(19) United States
(12) Patent Application Publication
(10) Pub. No.: US 2025/0027173 A1
(43) Pub. Date: Jan. 23, 2025

(54) DNA CLOCKS CAPABLE OF LONG-TERM TIMEKEEPING COMPRISING A COMPOSITION FOR MEASURING OR PREDICTING THE DURATION OF CELLULAR EVENTS IN CELLS

(71) Applicant: INDUSTRY-ACADEMIC COOPERATION FOUNDATION, YONSEI UNIVERSITY, Seoul (KR)

(72) Inventors: Hyongbum KIM, Seoul (KR); Ji-Hye PARK, Seoul (KR); Hanahrae LEE, Seoul (KR)

(21) Appl. No.: 18/741,498

(22) Filed: Jun. 12, 2024

(30) Foreign Application Priority Data
Jun. 13, 2023 (KR) 10-2023-0075529

(51) Int. Cl. C12Q 1/6897; C12Q 1/6811; C12Q 1/6874

(52) U.S. Cl. CPC C12Q 1/6897; C12Q 1/6811; C12Q 1/6874

(57) ABSTRACT

Disclosed are a DNA clock capable of recording long periods of time, comprising a composition for measuring or estimating elapsed time in cells, and a method of measuring or estimating elapsed time in cells using the composition.

### CROSS-REFERENCE TO RELATED APPLICATION

[0001] The priority of Korean Patent Application 10-2023-0075529 filed Jun. 13, 2023 is hereby claimed under the provisions of 35 USC § 119, and the disclosure thereof is hereby incorporated herein by reference in its entirety, for all purposes.

### SEQUENCE LISTING

[0002] This application includes an electronically submitted sequence listing in .xml format. The .xml file contains a sequence listing entitled “727 CorrectedSeqListing.xml” created on Aug. 26, 2024 and is 14,584 bytes in size. The sequence listing contained in this .xml file is part of the specification and is hereby incorporated by reference herein in its entirety.

### BACKGROUND OF THE INVENTION

### Field of the Invention

[0003] The present invention relates to a DNA clock capable of recording long periods of time, comprising a composition for measuring or estimating elapsed time in cells, and a method of measuring or estimating elapsed time in cells using the composition.

### Description of the Related Art

[0004] Chromosomal DNA provides an excellent means for writing biological information as well as storing the same in appropriate “memory” devices.

[0005] This DNA is not only structurally durable, but also has advantages such as compatibility and cost-effectiveness. DNA is an excellent storage medium, and its storage capacity can be amplified by a variety of molecular biology tools. With advances in biological systems, it is extremely important to keep track of multiple simultaneously occurring biological activities. DNA writers are genetic devices that have dual functions: writing the code of life as well as enabling to bring about modifications in the living cells through mechanisms like base substitutions, deletions, inversions and insertions.

[0006] Biological life is one of the most complex and dynamic systems in nature. Through evolution and natural selection, vast biochemical and biological diversity has emerged, from complex molecules to multicellular life. These multi-scale biological systems precisely generate and respond to a myriad of biotic signals of varying order and magnitude. Signals can take the form of ions, metabolites, nucleic acids or proteins, producing biochemical gradients and signaling cascades that propagate across many length and time scales within cells and across populations. The integration of these signals through genetic and epigenetic regulation at the transcriptional, translational and post-translational levels results in robust cellular behaviors.

[0007] The diverse and enormous number of signals inducing changes in the cell is extremely difficult to be kept track of. With the advent of genomics, DNA can be used as an excellent writing means as well as a storage medium for overcoming the stereotypic difficulties associated with traditional methods of storing biological information (Science. 2018 Aug. 31; 361(6405): 870-875).

[0008] DNA is the fundamental molecule by which information is stored and utilized to produce life. DNA is a high-density storage medium that can be quickly copied by exponential polymerase chain reaction (PCR) amplification and stably preserved. Biological information encoded in DNA can be directly converted into actionable cellular responses through gene regulation and expression.

[0009] Many molecular events that occur in biological systems are transient and thus difficult to monitor and study within their native context. However, DNA writing can be used to create molecular recorders that capture these transient signals and stably encode them into the DNA of cell populations or individual cells. Although gene regulation and gene expression mechanisms can be utilized to convert biological activities into cellular signals, these signals have to be stored in a specific format. Nucleic acid sequencing and Next Generation Sequencing (NGS) have harnessed several components of cell lifecycle events like adaptive immunity, phase variation systems, arrangements in the genome, and retron-mediated recording systems. Thereamong, one of the most popular molecular recording devices is the CRISPR Cas-based molecular recording device.

[0010] The CRISPR-Cas-based base editor has a limitation in that, since the function thereof is limited to substituting specific bases, it is impossible to write various base sequence patterns to predefined targets, making multiplex recording difficult. However, the present inventors have engineered a previously reported ‘DNA Typewriter’ system to a long-term time recording system (“long-term DNA clock”), which is even capable of multiplex recording in future, using the CRISPR-Cas-based prime editor and the ‘DNA Tape’, which is a target sequence having repeating sequences capable of recording various edit patterns (Choi J et al., Nature (2022)). The present inventors have developed a DNA tape construct having monomers that are repeating units, each containing a disrupted protospacer adjacent motif (PAM), and have found that the DNA tape construct may be used to record long periods of time, thereby completing the present invention.

### SUMMARY OF THE INVENTION

[0011] An object of the present invention is to provide a composition for measuring or estimating elapsed time in isolated cells.

[0012] Another object of the present invention is to provide a method for measuring or estimating elapsed time in cells using the composition.

[0013] To achieve the above objects, the present invention provides a composition for measuring or estimating elapsed time in isolated cells, comprising:
[0014] (a) a prime editor protein or a nucleic acid encoding the same;
[0015] (b) a DNA tape comprising a disrupted monomer, which includes a disrupted protospacer adjacent motif (PAM), and active monomers, each including a PAM; and
[0016] (c) a prime editing guide RNA (pegRNA) which comprises a spacer and a reverse transcription template (RTT) and recognizes the DNA tape.

[0017] The present invention also provides isolated cells having introduced therein:
[0018] (a) a nucleic acid that encodes a prime editor so that the prime editor is expressed or is planned to be expressed;
[0019] (b) a DNA tape comprising a disrupted monomer, which includes a disrupted PAM, and active monomers, each including a PAM; and
[0020] (c) a prime editing guide RNA (pegRNA) which comprises a spacer and a reverse transcription template (RTT) and recognizes the DNA tape.

[0021] The present invention also provides a method for measuring or estimating elapsed time in isolated cells, comprising steps of:
[0022] transducing the composition into the isolated cells and then culturing the cells;
[0023] harvesting the cultured cells at any time point t, and then analyzing whether a sequence has been inserted into the DNA tape from the genomic DNA of the cells;
[0024] based on analyzing whether the sequence has been inserted into the DNA tape, measuring the fraction of an inserted sequence at each insertion site in the copies of the DNA tape sequence at time t, that is, an insertion frequency (IF_{i,t}) at i^{th} insertion site at time t;
[0025] measuring the frequency of the copy number of an intact sequence at each insertion site in the total copy number of the DNA tape sequence at time t, that is, the frequency of intact sequence (F_{i,t}) at i^{th} insertion site at time t; and
[0026] calculating the time elapsed from a given time point using the following equation:

$${F}_{i , t} = 1 - {IF}_{i , t} = {e}^{- {λ}_{i} ( t - {t}_{0} )} ( t \geq 0 , {t}_{0} \geq 0 )$$

[0027] wherein F_{i,t} represents the frequency (fraction) of the copy number of an intact sequence at the i^{th} insertion site relative to the total copy number of the DNA tape, analyzed at any time point t, IF_{i,t} represents the fraction of an inserted sequence at the i^{th} insertion site, measured at any time point t, λᵢ is a positive constant that represents the rate of sequence insertion by prime editing at the i^{th} insertion site per unit time, and t₀ is the latent time taken for the composition transduced into the cells to be expressed.

### BRIEF DESCRIPTION OF THE DRAWINGS

[0028] FIG. 1 shows a vector construct used to produce PE2max knock-in cells and the expression of mRFP fluorescence by the produced PE2max knock-in cells.

[0029] FIG. 2 schematically shows a lentiviral vector constructed by cloning a DNA tape, which comprises a target sequence, and a prime editing guide RNA that can cause 3-bp sequence insertion and 1-bp substitution simultaneously in the DNA tape.

[0030] FIG. 3 schematically shows the structure of a DNA tape used in a novel DNA Typewriter system of the present invention and the structure of the DNA tape after repeated sequence insertions.

[0031] FIG. 4 schematically shows the working of the novel DNA Typewriter system of the present invention based on the sequence used in the examples, with the following sequences being shown in FIG. 4: nnnnnntcgnnnnnnnnnnntggnnnnnnnnnnntggnnnnnnnnnnntggnnnnnnnnnnn (SEQ ID NO: 6); nnnnnntcgnnnnnnnnnnnnnntcgnnnnnnnnnnntggnnnnnnnnnnntggnnnnnnnn nnn (SEQ ID NO: 7); and nnnnnntcgnnnnnnnnnnnnnntcgnnnnnnnnnnnnnntcgnnnnnnnnnnntggnnnnn nnnnnn (SEQ ID NO: 8).

[0032] FIG. 5 is a graph showing the insertion fraction (%) depending on the number of sequences inserted into the DNA tape sequence at each measurement time point.

[0033] FIG. 6 shows the results of comparing the true elapsed time with the elapsed time estimated based on an exponential decay curve fitted to experimental data.

[0034] FIGS. 7A and 7B show the monomer deletions (FIG. 7A), estimated elapsed time, and mean RAE values (FIG. 7B) that occurred as a result of an experiment conducted using the TAPE-1 sequence provided in the DNA Typewriter paper.

[0035] FIGS. 8A and 8B show the monomer deletions (FIG. 8A), estimated elapsed time, and mean RAE values (FIG. 8B) that occurred as a result of an experiment conducted using a DNA Typewriter sequence predicted to have highest prime editing efficiency according to the DeepPrime algorithm, among all possible DNA Typewriter constructs.

[0036] FIG. 9 shows the change in number of monomers for 28 days when using the engineered DNA Typewriter construct (using the sequence described in Example 2) according to the present invention, and indicates that the relative proportion of reads with deleted monomers do not tend to increase compared to when using a conventional DNA Typewriter construct.

### DETAILED DESCRIPTION OF THE INVENTION

[0037] Unless otherwise defined, all technical and scientific terms used in the present specification have the same meanings as commonly understood by those skilled in the art to which the present disclosure pertains. In general, the nomenclature used in the present specification is well known and commonly used in the art.

[0038] DNA is well suited to serve as a digital medium for in vivo molecular recording. However, DNA-based memory devices are constrained in terms of the number of distinct ‘symbols’ that can be concurrently recorded or by failure to capture the order in which events occur. DNA Typewriter, a general system for in vivo molecular recording that overcomes these and other limitations, was proposed (Choi J et al., Nature (2022)).

[0039] For a DNA Typewriter, ‘DNA tape’ is used as a recording medium. DNA tape is a sequence consisting of repeats of a 14-bp monomer. In this system, the prime editing guide RNA mediates the short insertional edits between monomers while shifting the position of the ‘write-head’ by one unit along the DNA tape, and involves successive genome editing.

[0040] Specifically, the DNA Typewriter includes a structure in which the editing site shifts forward by one monomer after sequence insertion occurs in the editing site, which acts as a write-head, in each editing round.

[0041] At this time, the 20-bp spacer of the prime editing guide RNA of the DNA Typewriter binds to the appropriate 20-bp write-head sequence and works, while the 17-bp length thereof may also bind to other monomers that must act in subsequent rounds rather than the write-head sequence in the corresponding editing round, and sequence insertion may occur at a site other than the editing site for the corresponding round. In this case, there is no guarantee that sequence insertion occurs sequentially while the write-head shifts forward by one monomer.

[0042] Accordingly, the present inventors have developed a novel DNA Typewriter system. This DNA Typewriter system is a system designed by reducing the sequence length, at which the guide RNA can bind to monomers in the 3′ direction with respect to the editing site, to 12 bp (less than 16 bp) so that the guide RNA cannot edit sites other than the editing site for the corresponding round.

[0043] According to the present invention, to overcome the monomer deletion-related problem occurring in the conventional DNA Typewriter system, in the DNA tape sequence with repeated monomers, 1) the length at which the spacer can bind to the remaining portions other than the target for the corresponding round in the DNA tape sequence is set to be shorter than 16 bp, and 2) the PAM in the monomer sequence where prime editing occurred, allowing successive sequence insertions to proceed in the 5′→3′ direction in the DNA tape sequence.

[0044] It is known that the minimum length, at which the spacer of the guide RNA spacer can bind to the target sequence and induce nicking with nuclease, is 16 bp (Dahlman J E et al., Nature Biotechnology (2015)). Therefore, the system of the present invention is a system that minimizes the possibility of occurrence of monomer deletions, observed in the conventional DNA Typewriter system, by setting the length of the spacer, which can bind to the remaining portions other than the target for the corresponding round in the DNA tape sequence, to be shorter than 16 bp.

[0045] Based on this, the present invention provides a composition for measuring or estimating elapsed time in cells, comprising:
[0046] (a) a prime editor protein or a nucleic acid encoding the same;
[0047] (b) a DNA tape comprising a disrupted monomer, which includes a disrupted protospacer adjacent motif (PAM), and active monomers, each including a PAM; and
[0048] (c) a prime editing guide RNA (pegRNA) which comprises a spacer and a reverse transcription template (RTT) and recognizes the DNA tape.

[0049] The present invention also provides isolated cells having introduced therein:
[0050] (a) a nucleic acid that encodes a prime editor so that the prime editor is expressed or is planned to be expressed;
[0051] (b) a DNA tape comprising a disrupted monomer, which includes a disrupted PAM, and active monomers, each including a PAM; and
[0052] (c) a prime editing guide RNA (pegRNA) which comprises a spacer and a reverse transcription template (RTT) and recognizes the DNA tape.

[0053] The prime editor is a type of gene editing system based on CRISPR/Cas9 derived from the bacterial immune system. Usually, wild-type Cas9 causes a DNA double-strand break in a specific sequence on the genome, which is complementary to the guide RNA. The prime editor protein is a genome editing method that can introduce genetic changes by breaking only one strand of DNA by fourth-generation gene editing technology without breaking both strands of DNA.

[0054] The prime editor may be, for example, one selected from the group consisting of PE1, PE2, PE3, and PE3b, PE4, PE5, PE6, and PE7, without being limited thereto.

[0055] The prime editor may be, for example, wild-type PE2, and specifically may be NGG-PAM-Cas9 nickase H840A comprising the nucleotide sequence of SEQ ID NO: 1.

[0056] The prime editor may comprise a variant that retains the same function. The variant may be a variant mutated to recognize NG-PAM.

[0057] The prime editor variant mutated to recognize NG-PAM may be one in which a specific nucleic acid sequence in the C-terminal region of the Cas9 nickase domain of wild-type PE2 is modified. For example, the prime editor variant mutated to recognize NG-PAM may contain at least one substitution selected from the group consisting of: substitution of nucleotides AG for CT at positions 3385 and 3386 in the nucleotide sequence of NGG-PAM-Cas9 nickase of SEQ ID NO: 1, which is wild-type; substitution of nucleotide T for A at position 3458 in the nucleotide sequence of NGG-PAM-Cas9 nickase of SEQ ID NO: 1; substitution of nucleotide A for G at position 3706 in the nucleotide sequence of NGG-PAM-Cas9 nickase of SEQ ID NO: 1; substitution of nucleotides ATTC for CGAA at positions 3708 to 3711 in the nucleotide sequence of NGG-PAM-Cas9 nickase of SEQ ID NO: 1; substitution of nucleotides AGG for GCC at positions 4018 to 4020 in the nucleotide sequence of NGG-PAM-Cas9 nickase of SEQ ID NO: 1; substitution of nucleotides GT for AG at positions 4057 and 4058 in the nucleotide sequence of NGG-PAM-Cas9 nickase of SEQ ID NO: 1; substitution of nucleotides GG for CC at positions 4064 and 4065 in the nucleotide sequence of NGG-PAM-Cas9 nickase of SEQ ID NO: 1; and substitution of nucleotide C for T at position 4155 in the nucleotide sequence of NGG-PAM-Cas9 nickase of SEQ ID NO: 1.

[0058] The prime editor comprises: (i) nickase or a dead editor; and (ii) Moloney murine leukaemia virus (M-MLV) reverse transcriptase (RT).

[0059] The nickase may be a variant of Cas protein modified to nick a single strand of DNA, and the dead editor may be a variant of Cas protein modified to bind to a target sequence but not induce DNA nicking.

[0060] The Cas protein may be Cas1, Cas1B, Cas2, Cas3, Cas4, Cas5, Cas6, Cas7, Cas8, Cas9, Cas10, Cas12a, Cas12b, Cas12c, Cas12d, Cas12e, Cas12g, Cas12h, Cas12i, Cas12j, Cas13a, Cas13b, Cas13c, Cas13d, Cas14, Csy1, Csy2, Csy3, Cse1, Cse2, Csc1, Csc2, Csa5, Csn2, CsMT2, Csm3, Csm4, Csm5, Csm6, Cmr1, Cmr3, Cmr4, Cmr5, Cmr6, Csb1, Csb2, Csb3, Csx17, Csx14, Csx10, Csx16, CsaX, Csx3, Csx1, Csx15, Csf1, Csf2, Csf3 or Csf4 endonuclease, without being limited thereto.

[0061] The Cas protein may be derived or isolated from a Cas protein ortholog-containing microorganism selected from the group consisting of Corynebacter, Sutterella, Legionella, Treponema, Filifactor, Eubacteriurn, Streptococcus (Streptococcus pyogenes), Lactobacillus, Mycoplasma, Bacteroides, Flaviivola, Flavobacteriurn, Azospirillurn, Gluconacetobacter, Neisseria, Roseburia, Parvibaculurn, Staphylococcus (Staphylococcus aureus), Nitratifractor, Corynebacterium, and Campylobacter. Alternatively, the Cas protein may be a recombinant protein.

[0062] The Cas protein may be Streptococcus pyogenes Cas9 (SpCas9). Recognition of a protospacer adjacent motif (PAM) recognition by SpCas9 is the critical first step of target DNA recognition, enabling SpCas9 to bind to and hydrolyze DNA. SpCas9, the most robust and widely used Cas9, primarily recognizes NGG PAMs.

[0063] The variant of Cas protein is a variant retaining the function of Cas nuclease, and examples thereof include, but are not limited to, xCas9, SpCas9-NG, Cas9 nickase (nCas9), dead Cas9 (dCas9), and destabilized Cas9 (DD-Cas9).

[0064] The nickase may be one in which at least one amino acid selected from the group consisting of D10, E762, H839, H840, N854, N863, and D986 of Cas9 is substituted with a different amino acid.

[0065] Streptococcus pyogenes Cas9 may contain a mutation in which at least one selected from the group consisting of catalytic aspartate residue at position 10 (D10), glutamic acid at position 762 (E762), histidine at position 840 (H840), asparagine at position 854 (N854), asparagine at position 863 (N863), and aspartic acid at position 986 (D986) is substituted with any different amino acid. Here, any different amino acid for substitution may be alanine, without being limited thereto.

[0066] In some embodiments, the Streptococcus pyogenes Cas9 protein may be mutated to recognize NGA (where N is any base selected from among A, T, G, and C), which is different from the PAM sequence (NGG) recognized by wild-type Cas9, by substituting at least one selected from among aspartic acid at position 1135 (D1135), arginine at position 1335 (R1335), and threonine at position 1337 (T1337), for example, all of the three amino acids, with a different amino acid.

[0067] For example, in the amino acid sequence of the Streptococcus pyogenes Cas9 protein, amino acid substitution may occur at
[0068] (1) D10, H840, or D10+H840;
[0069] (2) D1135, R1335, T1337, or D1135+R1335+T1337; or
[0070] (3) both residues (1) and (2).

[0071] The term “different amino acid” means an amino acid selected from among alanine, isoleucine, leucine, methionine, phenylalanine, proline, tryptophan, valine, asparagine, cysteine, glutamine, glycine, serine, threonine, tyrosine, aspartic acid, glutamic acid, arginine, histidine, lysine, and all known variants of the amino acids thereof, exclusive of the amino acid found at the original mutation positions in the wild-type protein. In one example, the “different amino acid” may be alanine, valine, glutamine, or arginine.

[0072] The “reverse transcriptase (RT)” refers to an enzyme that uses RNA as a template and synthesizes new complementary DNA.
[0073] (a) The reverse transcriptase (RT) is an RNA-dependent DNA polymerase that can synthesize DNA strands (i.e., complementary DNA (cDNA)) using a reverse transcriptase template.
[0074] (b) Examples of the reverse transcriptase include, but are not limited to, Moloney murine leukemia virus (M-MLV) reverse transcriptase (RT) or a variant thereof, for example, RNase H activity-deficient M-MLV-RT or M-MLV RT variants (D200N, T306K, W313F, T330P, or L603W), bovine leukemia virus (BLV) RT or a variant thereof, Rous sarcoma virus (RSV) RT or a variant thereof, or avian myeloblastosis virus (AMV) RT or a variant thereof.

[0075] The prime editor and reverse transcriptase may individually comprise a prime editor protein and reverse transcriptase, respectively, or may be included in the form of a fusion protein of the prime editor protein and reverse transcriptase.

[0076] The prime editing guide RNA or DNA encoding the same comprises a binding site, which binds to the gene to be edited, and an editing sequence. The binding site may be arbitrarily located in the 5′ direction or 3′ direction of the reverse transcriptase template. Specifically, the binding site may be located in the 3′ direction of the reverse transcriptase template.

[0077] The binding site may comprise a sequence complementary to a genomic DNA strand nicked by a nuclease or variant thereof (e.g., nickase) contained in the prime editor protein. The binding site may hybridize to a target site, thereby serving as a target site for the initiation of reverse transcriptase activity.

[0078] The prime editing guide RNA comprises a guide sequence that recognizes the target sequence, a tracrRNA scaffold sequence, a primer binding site (PBS) required for the initiation of reverse transcription, and an RT template (RTT) that includes the desired genetic change.

[0079] The sequence comprising the editing sequence serves as a reverse transcriptase template. The reverse transcriptase template comprises the desired editing sequence and is homologous to the genomic DNA locus. The editing sequence is a heterologous sequence and comprises the target sequence to be edited in the genome.

[0080] The types of editing include substitution, insertion, deletion, etc., without being limited thereto. The types of editing include the type (e.g., A, G, C, T) or number (e.g., 1 bp, 2 bp, 3 bp, etc.) of nucleotides to be substituted, inserted, or deleted in the target sequence.

[0081] The editing position may be calculated based on the nick site. For example, the editing position may be expressed as +1, +2, +3, etc. from the nick site.

[0082] The “nick site” refers to the site in the target sequence, which is nicked by Cas9-nickase.

[0083] The “PAM” is a sequence essentially required for the Cas protein to bind to target DNA, and refers to the sequence located after the target nucleic acid. Bacteria store a portion of the sequence of an invading virus in a part of their genome, and this sequence is called the protospacer. Since the protospacer sequence is a partial sequence, the sequence adjacent thereto is the original sequence of the bacteria. The role of the PAM site is to prevent a sequence from being cleaved, unless the sequence is not flanked by the PAM, even though many sequences in bacteria may match the protospacer.

[0084] The “disrupted PAM” in the DNA tape sequence refers to a sequence that has been edited (substitution/insertion/deletion) by prime editing and can no longer function as the PAM.

[0085] A “monomer” is a repeating sequence unit present in the DNA tape, and in one monomer there is only one disrupted PAM or a PAM.

[0086] The “disrupted monomer” refers to a monomer having a disrupted PAM instead of a PAM, and the “active monomer” refers to a monomer having a PAM.

[0087] In the DNA tape sequence, two or more active monomers are repeatedly arranged in a row. In the DNA tape sequence, several active monomers are arranged in a line at the 3′ end of the disrupted monomer.

[0088] In the DNA tape sequence, several active monomers are arranged, and a disrupted monomer is present adjacent to the 5′ end of the active monomer that is present closest to the 5′ end among the active monomers. Here, the active monomer that is present closest to the 5′ end is hereinafter referred to as the “first active monomer”. In the 5′ direction of this disrupted monomer, the insert sequence and the disrupted monomer are alternately arranged. In this case, the spacer of the prime editing guide RNA is complementary to the 20-bp sequence in the 5′ direction of the PAM present in the first active monomer of the DNA tape. In the alternating arrangement of the disrupted monomers and the insert sequences, a 5′ portion exceeding 20 bp to which the space is to bind may be omitted.

[0089] When an environment in which prime editing can occur is created by treating cells with the composition, 1) a specific sequence is inserted at the 5′ side of the active monomer (hereinafter referred to as “insertion site”) in the target, and 2) the PAM in the first active monomer is disrupted. Likewise. successive sequence insertions as well as PAM disruption occur repeatedly in the 5′→3′ direction within the DNA tape. The specific process is as follows:

[0090] When the prime editing guide RNA recognizes a target including the PAM in the first active monomer and generates a DNA single-strand break (hereinafter referred to as “'nick”), a specific sequence inscribed in the RTT of the prime editing guide RNA is inserted between the first active monomer and simultaneous edit is installed within the PAM of the first active monomer, thereby depriving its potential to function as a PAM sequence. Accordingly, the first active monomer is changed to a disrupted monomer. The PAM in the active monomer at the next editing site located at the 3′ side of this monomer functions as a new PAM to be recognized by the prime editing guide RNA, and the target sequence of the prime editing guide RNA and the write-head shift in the 3′ direction of the DNA tape by one monomer unit. In the same manner, the prime editing guide RNA inserts a specific sequence into the next write-head, disrupts the PAM recognized in the corresponding round, and shifts the write-head in the 3′ direction again by one monomer unit. As this prime editing process is repeated, insertion of a specific sequence sequentially occurs between the monomers in the DNA tape in the 5′→3′ direction.

[0091] The DNA tape sequence is designed considering the following factors. The length of the disrupted PAM sequence in one disrupted monomer is referred to as i_{D}bp, and the length of the PAM sequence in one active monomer is referred to as i_{A}bp. The length of the sequence present at the 5′ side of the PAM or disrupted PAM in one monomer is denoted as j bp, the length of the sequence present in the 3′ direction with respect to the PAM or disrupted PAM sequence is denoted as k bp, and the length of the sequence inserted by prime editing is denoted as m bp. Accordingly, the length of one disrupted monomer is (j+i_{D}+k) bp, and the length of one active monomer is (j+i_{A}+k) bp. Here, i_{D}, i_{A}, j and k are integers greater than 0.

[0092] 1) The spacer in the prime editing guide RNA should contain a k-bp sequence located at the 5′ side of the PAM, one or more disrupted monomers, and a portion or all of the insert sequence. That is, i_{D}, j and k are set to satisfy k+(j+i_{D}+k)<20. Additionally, as previously known, the spacer can bind to the target sequence and induce editing when it is 16 bp or longer in length. Thus, if the spacer is used with a reduced length, it is also possible to further limit the maximum value of k+(j+i_{D}+k) to less than 16.

[0093] 2) The prime editing guide RNA can recognize and bind to a (j+k) bp sequence near the PAM of the active monomer in a portion other than the editing site for the corresponding round. In order to minimize monomer deletions caused by the prime editing guide RNA, (j+k) bp, which is the length of the sequence that binds to the target sequence, is set to be less than 16 bp. However, if the disrupted PAM sequence and the PAM sequence share the same sequence at their 3′ ends, the prime editing guide RNA can additionally bind to this sequence, and thus the length of (j+k) bp plus the length of the sequence identical between the PAM and the disrupted PAM is set to be less than 16 bp. For example, if the PAM sequence is TGG and the disrupted PAM sequence is TCG, the last ‘G’ of each of TG‘G’ and TC‘G’ are the same, and in this case, (j+k)+1<16 should be satisfied.

[0094] j represents an integer greater than 0, which is less than or equal to the distance between the PAM sequence in one monomer and the nick site induced by the prime editing guide RNA that binds to the 20-bp sequence adjacent to the 5′ side of the PAM.

[0095] i_{A} is determined by the PAM sequence to be used, and i_{A} is determined by the PAM sequence and the type of result of prime editing that disrupts the PAM sequence. If the result of prime editing inducing PAM disruption is substitution, i_{D}=i_{A}, if the result is insertion, i_{D}<i_{A}, and if the result is deletion, i_{D}<i_{A}.

[0096] For example, in the DNA tape, the disrupted monomer may comprise TCGNNNNNNNNNNN (where N is A, T, G, or C), and the active monomer may comprise TGGNNNNNNNNNNN (where N is A, T, G, or C).

[0097] The pegRNA comprises a spacer that recognizes a 20-bp sequence present at the 5′ side with respect to the PAM of the active monomer, a reverse transcription template (RTT) to be used for prime editing, and a primer binding site (PBS). The PBS is the same sequence as the 5′ portion with respect to the nick site of the target sequence, and the length thereof is variable, but the efficiency of prime editing may vary depending on the length of the PBS. The RTT is a portion that specifies the sequence of the result to be edited during prime editing, and the length thereof is also variable, but the efficiency of prime editing may vary depending on the length of the RTT. The RTT may comprise: 1) a specific sequence to be inserted; and 2) a portion or all of the disrupted monomer. However, if the RTT length exceeds the length of the insert sequence and the disrupted monomer, a repeating sequence of the active monomer may be included behind the disrupted monomer.

[0098] When the composition comprising the nucleic acid encoding the prime editor protein, the DNA tape, and the prime editing guide RNA is delivered into cells, the working time of prime editing in the cells may be measured and estimated by a method comprising steps of:
[0099] (a) transducing the composition into isolated cells and then culturing the cells;
[0100] (b) analyzing whether a sequence has been inserted into the DNA tape, and measuring the fraction of an inserted sequence at each insertion site of the DNA tape at time t, that is, the insertion frequency (IF_{i,t}) at the i^{th} insertion site at time t;
[0101] (c) measuring the frequency of the copy number of an intact sequence at each insertion site in the total copy number of the DNA tape sequence at time t, that is, the frequency of intact sequence (F_{i,t}) at the i^{th} insertion site at time t; and
[0102] (d) calculating the time elapsed from a given time point using the following equation:

$${F}_{i , t} = 1 - {IF}_{i , t} = {e}^{- {λ}_{i} ( t - {t}_{0} )} ( t \geq 0 , {t}_{0} \geq 0 )$$

[0103] wherein F_{i,t} represents the frequency (fraction) of the copy number of an intact sequence at the i^{th} insertion site relative to the total copy number of the DNA tape sequence, analyzed at any time point t, IF_{i,t} represents the frequency of an inserted sequence at the i^{th} insertion site, measured at any time point t, λᵢ is a positive constant that represents the rate of sequence insertion by prime editing at the i^{th} insertion site per unit time, and t₀ is the latent time taken for the composition transduced into the cells to be expressed.

[0104] In the present invention, step (b) of analyzing whether a sequence has been inserted into the DNA tape and measuring IF_{i,t} comprises obtaining a DNA sequence from cells that exhibit the prime editing activity of the transduced composition. This step of obtaining the DNA sequence may be performed using various DNA isolation methods known in the art.

[0105] Since it is considered that editing in the target sequence has occurred in each of the transduced cells, data may be obtained by performing sequencing of the target sequence, for example, deep sequencing or RNA sequencing.

[0106] In the present invention, step (c) comprises measuring F_{i,t} at each insertion site in the DNA tape at time t.

[0107] IF_{i,t} is calculated using the following equation (Park et al., Cell, 2021):

$${IF}_{i , t} = \frac{( Observed insertion frequency ) - ( background insertion frequency )}{100 - ( background insertion frequency )}$$

[0108] Then, in step (d), using the fact that F_{i,t} and IF_{i,t} satisfy the relationship F_{i,t}=1−IF_{i,t}, the time elapsed from a given time point in the cells is calculated using the following equation:

$${F}_{i , t} = 1 - {IF}_{i , t} = {e}^{- {λ}_{i} ( t - {t}_{0} )} ( t \geq 0 , {t}_{0} \geq 0 )$$

[0109] This time measurement method is based on the previous report that the frequency of intact target sequences decreases exponentially over time.

[0110] If the concentrations of the prime editor protein and prime editing guide RNA are kept constant, it is assumed that the sequence insertion reaction by prime editing is a first-order reaction based on the reaction rate law.

[0111] In the first-order reaction, the reaction rate is linearly proportional to the concentration of each reactant, and thus the rate of decrease in

$${F}_{i , t} ( \frac{{dF}_{i , t}}{{d}_{t}} )$$

may be expressed by the following equation:

$$\begin{matrix}( a ) & \\ \frac{{dF}_{i , t}}{{d}_{t}} = - {λ}_{i} {F}_{i , t} ( {λ}_{i} > 0 ) & equation ( 1 )\end{matrix}$$

[0112] The definite integral equation for time t in equation (1) above is as follows:

$$\begin{matrix}( a ) & \\ {F}_{i , t} = {e}^{- {λ}_{i} t} & equation ( 2 )\end{matrix}$$

[0113] As shown in equation (2) above, F_{i,t} follows the exponential decay that is used in radiometric dating.

[0114] The rate constant λᵢ may vary depending on the sequence composition of the target sequence when introducing the target sequence using lentiviral transduction, the concentrations of the prime editor and the prime editing guide RNA, and the type of cell line used for recording.

[0115] Herein, “editing” may be used interchangeably with “edit” or “edited”, and the term “gene editing technology” refers to a method of altering the nucleic acid sequence of a specific genomic target. Such a specific genomic target includes, but is not limited to, a chromosomal region, a gene, a promoter, an open reading frame, or any nucleic acid sequence.

[0116] As used herein, the term “target” or “target site” refers to a pre-identified nucleic acid sequence of any composition and/or length. Such a target includes, but is not limited to, a chromosomal region, a gene, a promoter, an open reading frame, or any nucleic acid sequence.

[0117] As used herein, “on-target” refers to a subsequence of a specific genomic target that may be completely complementary to a programmable DNA binding domain and/or a guide RNA sequence.

[0118] The terms “polypeptide”, “peptide” and “protein” are used interchangeably to refer to a polymer of amino acid residues, wherein the polymer may be conjugated to a moiety that does not consist of amino acids in the examples. The terms may apply to amino acid polymers in which one or more amino acid residues are artificial chemical mimetics of corresponding naturally occurring amino acids, as well as to naturally occurring amino acid polymers and non-naturally occurring amino acid polymers. A “fusion protein” may refer to a chimeric protein encoding two or more separate protein sequences that are recombinantly expressed as a single moiety.

[0119] The term “amino acid” may refer to naturally occurring and synthetic amino acids, as well as amino acid analogs and amino acid mimetics that function in a manner similar to the naturally occurring amino acids. Naturally occurring amino acids include those encoded by the genetic code, as well as those amino acids that are later modified, e.g., hydroxyproline, γ-carboxyglutamate, and O-phosphoserine. Amino acid analogs include compounds that have the same basic chemical structure as a naturally occurring amino acid, i.e., a carbon that is bonded to a hydrogen, a carboxyl group, an amino group, and an R group, e.g., homoserine, norleucine, methionine sulfoxide, methionine methyl sulfonium. Such analogs have modified R groups (e.g., norleucine) or modified peptide backbones, but may retain the same basic chemical structure as a naturally occurring amino acid. Amino acid mimetics include chemical compounds that have a structure that is different from the general chemical structure of an amino acid, but that function in a manner similar to a naturally occurring amino acid. The terms “non-naturally occurring amino acids” and “non-natural amino acids” include amino acid analogs, synthetic amino acids and amino acid mimetics, which are not found in nature.

[0120] The invention is also directed to a nucleic acid encoding the composition.

[0121] The term “nucleic acid” is used interchangeably with “oligonucleotides”, “polynucleotides”, “nucleotides” and “nucleotide sequences”. The term may include a polymeric form of nucleotides of any length, either deoxyribonucleotides or ribonucleotides, or analogs thereof. Polynucleotides may have any three-dimensional structure, and may perform any function, known or unknown. A polynucleotide may comprise modified nucleotides, such as methylated nucleotides and nucleotide analogs. If present, modifications to the nucleotide structure may be imparted before or after assembly of the polymer.

[0122] The polynucleotide may typically comprise four nucleotide bases: adenine (A), cytosine (C), guanine (G), and thymine (T) (uracil (U) for thymine (T) when the polynucleotide is RNA).

[0123] The term “sequence” is the alphabetical representation of a molecule. This alphabetical representation may be input into databases in a computer having a central processing unit and used for bioinformatics applications such as functional genomics and homology searching. Polynucleotides may optionally include one or more non-standard nucleotide(s), nucleotide analog(s) and/or modified nucleotides.

[0124] The term “nucleic acid” may include deoxyribonucleotides or ribonucleotides and polymers in either single-, double- or multiple stranded form, or complements thereof. The term “polynucleotide” may include a linear sequence of nucleotides.

[0125] The nucleic acid may be linear or branched. For example, the nucleic acid may be a linear chain of nucleotides, or the nucleic acid may be branched so that it makes up one or more nucleotide arms or branches.

[0126] The nucleic acid may be an RNA sequence, a DNA sequence, or a combination thereof (RNA-DNA combination sequence).

[0127] “Conservatively modified variations” may be applied to nucleic acid sequences. With respect to particular nucleic acid sequences, “conservatively modified variations” refers to those nucleic acids which encode identical or essentially identical amino acid sequences. Due to degeneracy of the genetic code, a large number of nucleic acid sequences can encode any given protein. For example, the codons GCA, GCC, GCG and GCU all encode the amino acid alanine. Thus, at every position where an alanine is specified by a codon, the codon can be altered to any of the corresponding codons described without altering the encoded polypeptide. Such nucleic acid variations are “silent variations”, which are one species of conservatively modified variations. Every nucleic acid sequence which encodes a polypeptide may also include every possible silent variation of the nucleic acid. One of skill will recognize that each codon in a nucleic acid (except AUG, which is ordinarily the only codon for methionine, and TGG, which is ordinarily the only codon for tryptophan) can be modified to yield a functionally identical molecule.

[0128] The term “isolated”, when applied to a nucleic acid or protein, denotes that the nucleic acid or protein is essentially free of other cellular components. Purity and homogeneity may be typically determined using analytical chemistry techniques such as polyacrylamide gel electrophoresis or high-performance liquid chromatography.

[0129] “Complementarity” or “complementary” refers to the ability of a nucleic acid to form hydrogen bond(s) with another nucleic acid sequence by either traditional Watson-Crick base pairing or other non-traditional types. For example, the sequence A-G-T is complementary to the sequence T-C-A. A percent complementarity indicates the percentage of residues in a nucleic acid molecule which can form hydrogen bonds (e.g., Watson-Crick base pairing) with a second nucleic acid sequence (e.g., 5, 6, 7, 8, 9, and 10 out of 10 being 50%, 60%, 70%, 80%, 90%, and 100% complementary, respectively). “Perfectly complementary” means that all the contiguous residues of a nucleic acid sequence will hydrogen bond with the same number of contiguous residues in a second nucleic acid sequence. “Substantially complementary”, as used herein, refers to a degree of complementarity that is at least 60%, 65%, 70%, 75%, 80%, 85%, 90%, or 95%. “Perfectly complementary” refers to a degree of complementarity that is at least 90%, 91%, 92%, 93%, 94%, 95%, 96%, 97%, 98%, 99% or 100% over a region of nucleotides, or refers to two nucleic acids that hybridize under stringent conditions.

[0130] The term “gene” means the segment of DNA involved in producing a protein and may include regions preceding and following the coding region (leader and trailer) as well as intervening sequences (introns) between individual coding segments (exons). The leader, the trailer and the introns include regulatory elements that are necessary during transcription and translation of a gene. Further, a “protein gene product” includes a protein expressed from a particular gene.

[0131] The nucleic acid may be delivered using a viral vector, for example, an adeno-associated viral vector (AAV), an adenoviral vector (AdV), lentiviral vector (LV) or a retroviral vector (RV), as well as other viral vectors such as episomal vectors containing Simian virus 40 (SV40) ori, bovine papilloma virus (BPV) ori, or Epstein-Barr nuclear antigen (EBV) ori, as well as virus-like particles (VLPs) or engineered virus-like particles (eVLPs).

[0132] The vector may be delivered in vivo or into cells through microinjection (e.g., direct injection into a lesion or target site), electroporation, lipofection, viral vector, nanoparticles, protein translocation domain (PTD) fusion proteins, etc.

[0133] For delivery, a known expression vector such as a plasmid vector, a cosmid vector, or a bacteriophage vector may be used, and the vector may be easily produced by those skilled in the art according to any known method using DNA recombination technology. The vector may be a viral vector or a plasmid vector, and the viral vector may specifically be a lentiviral vector or a retroviral vector. However, the present invention is not limited thereto, and those skilled in the art can freely use known vectors as long as the purpose of the present invention can be achieved.

[0134] For viral vectors, virally-derived DNA or RNA sequences are present in the vector for packaging into a virus (e.g. retroviruses, replication defective retroviruses, adenoviruses, replication defective adenoviruses, and adeno-associated viruses (AAVs)). Viral vectors also include polynucleotides carried by a virus for transfection into a host cell.

[0135] In certain cases, vectors are capable of autonomous replication in a host cell into which they are introduced (e.g. bacterial vectors having a bacterial origin of replication and episomal mammalian vectors). Other vectors (e.g., non-episomal mammalian vectors) are integrated into the genome of a host cell upon introduction into the host cell, and thereby are replicated along with the host genome.

[0136] Moreover, certain vectors are capable of directing the expression of genes to which they are operatively linked. Such vectors are referred to herein as “expression vectors”. Common expression vectors of utility in recombinant DNA techniques are often in the form of plasmids.

[0137] Recombinant expression vectors may comprise a nucleic acid in a form suitable for expression of the nucleic acid in a host cell, which means that the recombinant expression vectors comprise one or more regulatory elements, which may be selected on the basis of the host cells to be used for expression, that is operatively-linked to the nucleic acid sequence to be expressed.

[0138] Within a recombinant expression vector, “operably linked” is intended to mean that the nucleotide sequence of interest is linked to the regulatory element(s) in a manner that allows for expression of the nucleotide sequence (e.g., in an in vitro transcription/translation system or in a host cell when the vector is introduced into the host cell).

[0139] The term “regulatory element” may include promoters, enhancers, internal ribosomal entry sites (IRES), and other expression regulatory elements (e.g., transcription termination signals, such as polyadenylation signals and poly-U sequences). Regulatory elements include those that direct constitutive expression of a nucleotide sequence in many types of host cell and those that direct expression of the nucleotide sequence only in certain host cells (e.g., tissue-specific regulatory sequences). A tissue-specific promoter may direct expression primarily in a desired tissue of interest, such as muscle, neuron, bone, skin, blood, specific organs (e.g. liver, pancreas), or particular cell types (e.g. lymphocytes). Regulatory elements may also direct expression in a temporal-dependent manner, such as in a cell-cycle dependent or developmental stage-dependent manner, which may or may not also be tissue or cell-type specific.

[0140] In some embodiments, a vector may comprise one or more pol III promoters, one or more pol II promoters, one or more pol I promoters, or combinations thereof. Examples of pol III promoters include, but are not limited to, U6 and HI promoters. Examples of pol II promoters include, but are not limited to, the retroviral Rous sarcoma virus (RSV) LTR promoter (optionally with the RSV enhancer), the cytomegalovirus (CMV) promoter (optionally with the CMV enhancer) [see, e.g., Boshart et al, Cell, 41:521-530 (1985)], the SV40 promoter, the dihydrofolate reductase promoter, the β-actin promoter, the phosphoglycerol kinase (PGK) promoter, and the EF1α promoter.

[0141] The term “regulatory elements” may include enhancer elements, such as WPRE; CMV enhancers; and the intron sequence between exons 2 and 3 of rabbit β-globin. It will be appreciated by those skilled in the art that the design of the expression vector can depend on such factors as the choice of the host cell to be transformed, the level of expression desired, etc. A vector can be introduced into host cells to thereby produce transcripts, proteins, or peptides, including encoded by nucleic acids as described herein (e.g., clustered regularly interspaced short palindromic repeat (CRISPR) transcripts, proteins, enzymes, mutants thereof, fusion proteins thereof, etc.). Advantageous vectors include lentiviruses and adeno-associated viruses, and types of such vectors can also be selected for targeting particular types of cells.

[0142] Vectors may contain one or more marker sequences suitable for use in the identification and/or selection of cells which have or have not been transformed or genomically modified with the vector. Markers include, for example, genes encoding proteins which increase or decrease either resistance or sensitivity to antibiotics (e.g., kanamycin, ampicillin) or other compounds, genes which encode enzymes whose activities are detectable by standard assays known in the art (e.g., β-galactosidase, alkaline phosphatase or luciferase), and genes which visibly affect the phenotype of transformed or transfected cells, hosts, colonies, or plaques. Any vector suitable for the transformation of a host cell, (e.g., E. coli, mammalian cells such as CHO cell, insect cells, etc.) as embraced by the present invention, for example vectors belonging to the pUC series, pGEM series, pET series, pBAD series, pTET series, or pGEX series. In some embodiments, the vector is suitable for transforming a host cell for recombinant protein production. Methods for selecting and engineering vectors and host cells for expressing gRNAs and/or proteins (e.g., those provided herein), transforming cells, and expressing/purifying recombinant proteins are well known in the art.

[0143] Examples of the cells include, but are not limited to, eukaryotic cells (e.g., embryonic cells, stem cells, somatic cells, germ cells, etc.) derived from fungi such as yeast, eukaryotic animals, and/or eukaryotic plants, cells derived from eukaryotic animals (e.g., primates such as humans, monkeys, dogs, pigs, cattle, sheep, goats, mice, rats, etc.), or cells derived from eukaryotic plants (e.g. algae such as green algae, corn, soybeans, wheat, rice, etc.).

[0144] The DNA sequence encoding the prime editor protein, the DNA tape, and the DNA sequence encoding the prime editing guide RNA may be provided through a delivery means such as a vector. The DNA sequence encoding the prime editor protein, the DNA tape, and the DNA sequence encoding the prime editing guide RNA may be placed on the same vector, so that they may be delivered simultaneously by the single vector. The DNA sequence encoding the prime editor protein, the DNA tape, and the DNA sequence encoding the prime editing guide RNA may be placed on different vectors and delivered by the vectors.

[0145] In some embodiments, the sequence encoding the prime editor protein and the prime editing guide RNA may be delivered in mRNA form. The mRNA may be delivered directly into cells or delivered by a carrier.

[0146] Furthermore, an RNP (ribonucleoprotein) complex formed by assembling the prime editor protein (1) and the mRNA of the prime editing guide RNA (2) may be delivered. The RNP may be delivered directly or delivered by a carrier.

[0147] The RNP complex may be delivered into cells by various methods known in the art, such as microinjection, electroporation, DEAE-dextran treatment, lipofection, nanoparticle-mediated transfection, protein transduction domain-mediated introduction, and PEG-mediated transfection, without being limited thereto.

[0148] The carrier may comprise, for example, a cell-penetrating peptide (CPP), nanoparticles, or a polymer, without being limited thereto. CPPs are short peptides that facilitate cellular uptake of a variety of molecular cargoes (from nanosized particles to small chemical molecules and large fragments of DNA). With respect to the nanoparticles, the composition according to the present invention may be delivered by polymer nanoparticles, metal nanoparticles, metal/inorganic nanoparticles, or lipid nanoparticles.

### EXAMPLES

[0149] Hereinafter, the present invention will be described in more detail with reference to examples. These examples are only for illustrating the present invention, and it will be apparent to those of ordinary skill in the art that the scope of the present invention is not to be construed as being limited by these examples.

### Example 1. Establishment of PE2max Knock-In Cell Line Expressing Prime Editor

[0150] A monoclonal cell line expressing PE2max and hygromycin-resistance genes and mRFP fluorescence was produced using the Invitrogen™ Flp-In™ System and used in subsequent experiments (FIG. 1). FIG. 1 shows a vector construct used to produce PE2max knock-in cells and the expression of mRFP fluorescence by the produced PE2max knock-in cells.

### Example 2. Novel DNA Typewriter System

[0151] A lentiviral vector was constructed by cloning a DNA tape, which comprises a target sequence, and a prime editing guide RNA that can cause 3-bp sequence insertion and 1-bp substitution in the DNA tape (FIG. 2). The constructed vector was delivered into PE2max knock-in cells at a multiplicity of infection (MOI) of 0.3 so that one DNA tape and one prime editing guide RNA were introduced per cell. A schematic representation of the DNA tape is shown in FIG. 3. When editing occurs repeatedly as shown in FIG. 3, the active monomers included in the write-heads are sequentially changed to disrupted monomers, and a specific sequence is inserted between the monomers. The DNA tape has a structure in which a 3-bp sequence (GAG) at the 3′ end of the monomer, a 3-bp insert sequence (GTA), and a 14-bp disrupted monomer (TCGCCGGAGCTGAG; SEQ ID NO: 2) are arranged side by side, and then four active monomers (TGGCCGGAGCTGAG; SEQ ID NO: 3) are arranged in a tandem array (FIG. 3).

(1) Primer editing guide RNA:
(SEQ ID NO: 4)
GAGGTATCGCCGGAGCTGAGGTTTTAGAGCTAGAAATAGCAAGTTAAAAT
AAGGCTAGTCCGTTATCAACTTGAAAAAGTGGCACCGAGTCGGTGCTCAG
CTCCGGCGATACCTCAGCTCCGGCGCGCGGTTCTATCTAGTTACGCGTTA
AACCAACTAGAATTTTTTT
(2) DNA tape:
(SEQ ID NO: 5)
GAGGTATCGCCGGAGCTGAGTGGCCGGAGCTGAGTGGCCGGAGCTGAGTG
GCCGGAGCTGAGTGGCCGGAGCTGAG

[0152] If the five monomers of the DNA tape are referred to as monomers 1 to 5 according to the numbers assigned to the monomers in FIG. 3, the working principle of the novel DNA Typewriter is as follows (FIG. 4).

[0153] In the first round of editing, a sequence consisting of a combination of the 3-bp sequence located in front of monomer 1 (the same sequence as the last 3 bases of the monomer; GAG), the 3-bp insert sequence (GTA), and the 14-bp disrupted monomer (monomer 1) acts as a site to which a 20-bp spacer binds, and the first prime editing occurs. Insertion of a 3-bp nucleotide sequence at the 1^{st} insertion site occurs and at the same time, the PAM (TGG) of monomer 2 is changed to TCG by G-to-C substitution, causing PAM disruption, and thus monomer 2 is converted from an active monomer to a disrupted monomer. In the same manner, a combination of the 3-bp sequence at the 3′ end of monomer 1, the 3-bp insert sequence inserted in the first round of editing, and monomer 2 acts as a site to which the 20-bp spacer binds, and second prime editing occurs. At this time, insertion of a 3-bp sequence at the 2^{nd} insertion site occurs and at the same time, the PAM of monomer 3 is disrupted, and a combination of the 3-bp sequence at the 3′ end of monomer No. 2, the 3-bp insert sequence inserted in the second round of editing, and monomer 3 acts as a new site to which the 20-bp spacer binds. As such events occur repeatedly, 3-bp sequence insertions at insertion sites 1 to 4 occur sequentially.

[0154] After the DNA tape and the prime editing guide RNA were transduced into PE2max knock-in cells by lentivirus, the cells were harvested at intervals of 2 to 4 days while the cells were maintained for a predetermined period of time (28 days), and the DNA tape sequence was extracted from the genomic DNA (gDNA) of the cells. The DNA tape sequence was analyzed by NGS to check whether the intended sequence was inserted at each insertion site.

[0155] FIG. 5 shows the fraction of reads with insertion among all reads analyzed (%) depending on the number of sequences inserted into the DNA tape sequence at each measurement time point. Referring to FIG. 5, it can be confirmed that the number of sequence insertions increased over time.

### Example 3. Checking of Elapsed Time

[0156] F_{i,t} was calculated for each insertion site depending on elapsed time and was fitted with an exponential decay curve for each insertion site. Table 1 below shows the results of calculating the relative absolute error (RAE) and the mean RAE between the estimated elapsed time and the true elapsed time in each of two independent replicates using the decay curves.

TABLE 1

| True | replicate 1 | | replicate 2 | |
|---|---|---|---|---|
| elapsed | estimated | | estimated | |
| time | elapsed time | RAE (%) | elapsed time | RAE (%) |
| 2 | 0.46 | 76.79 | 0.52 | 73.88 |
| 4 | 2.53 | 36.70 | 3.00 | 25.10 |
| 7 | 5.21 | 25.63 | 7.04 | 0.64 |
| 10 | 9.93 | 0.72 | 11.87 | 18.74 |
| 14 | 13.66 | 2.44 | 14.02 | 0.17 |
| 17 | 16.78 | 1.30 | 18.43 | 8.43 |
| 23 | 22.90 | 0.43 | 23.77 | 3.35 |
| 28 | 25.37 | 9.41 | 26.61 | 4.95 |
| | mean RAE (%) | 19.18 | mean RAE (%) | 16.91 |

[0157] FIG. 6 shows the results of comparing the estimated elapsed time and the true elapsed time based on the exponential decay curves fitted to the experimental data shown in Table 1.

### Example 4. Monomer Deletion Events in Conventional DNA Typewriter

[0158] Regarding DNA Typewriter, Choi et al., Nature, Vol. 608, Aug. 4, 2022 describes a DNA Typewriter system that continuously install insertions into a DNA tape sequence using one or multiple types of pegRNA.

[0159] An experiment was conducted using the TAPE-1 sequence provided in Choi et al., Nature, Vol. 608, Aug. 4, 2022, and monomer deletion events (FIG. 7A), estimated elapsed time, and mean RAE values (FIG. 7B), which occurred as a result of the experiment, were checked.

[0160] As a result of conducting the experiment using the DNA Typewriter sequence predicted to be the best for prime editing among all possible DNA Typewriter constructs, notable monomer deletion events occurred incrementally as time passed (FIG. 8A).

[0161] The estimated elapsed time results and the mean RAE values (FIG. 8B) were checked. The DeepPrime algorithm (Volume 186, Issue 10, 11 May 2023, Pages 2256-2272.e23) was used to predict prime editing efficiency for sequence selection.

[0162] On the other hand, as a result of checking the number of monomers observed for 28 days when using the DNA clock construct according to the present invention (Example 2), it was confirmed that monomer deletions did not tend to increase compared to those in the DNA Typewriter construct (FIG. 9).

[0163] Although the present invention has been described in detail with reference to the specific features, it will be apparent to those skilled in the art that this description is only of a preferred embodiment thereof, and does not limit the scope of the present invention. Thus, the substantial scope of the present invention will be defined by the appended claims and equivalents thereto.

The application's sequence listing, which the Patent Office published only in electronic form, follows.

SEQUENCE LISTING (3723 sequences)

SEQ ID NO: 1 - DNA, 20 bp, synthetic construct
  misc_feature 1..20: note = Synthetic Sequence
  source 1..20: mol_type = other DNA
tgtaatcccagcactttggg

SEQ ID NO: 2 - DNA, 20 bp, synthetic construct
  misc_feature 1..20: note = Synthetic Sequence
  source 1..20: mol_type = other DNA
tcccaaagtgctgggattac

SEQ ID NO: 3 - DNA, 20 bp, synthetic construct
  misc_feature 1..20: note = Synthetic Sequence
  source 1..20: mol_type = other DNA
gcctgtaatcccagcacttt

SEQ ID NO: 4 - DNA, 20 bp, synthetic construct
  misc_feature 1..20: note = Synthetic Sequence
  source 1..20: mol_type = other DNA
cccagcactttgggaggccg

SEQ ID NO: 5 - DNA, 20 bp, synthetic construct
  misc_feature 1..20: note = Synthetic Sequence
  source 1..20: mol_type = other DNA
cctcagcctcccgagtagct

SEQ ID NO: 6 - DNA, 20 bp, synthetic construct
  misc_feature 1..20: note = Synthetic Sequence
  source 1..20: mol_type = other DNA
cccagctactcgggaggctg

SEQ ID NO: 7 - DNA, 20 bp, synthetic construct
  misc_feature 1..20: note = Synthetic Sequence
  source 1..20: mol_type = other DNA
gcctcagcctcccgagtagc

SEQ ID NO: 8 - DNA, 20 bp, synthetic construct
  misc_feature 1..20: note = Synthetic Sequence
  source 1..20: mol_type = other DNA
cctcagcctcctgagtagct

SEQ ID NO: 9 - DNA, 20 bp, synthetic construct
  misc_feature 1..20: note = Synthetic Sequence
  source 1..20: mol_type = other DNA
gctactcgggaggctgaggc

SEQ ID NO: 10 - DNA, 20 bp, synthetic construct
  misc_feature 1..20: note = Synthetic Sequence
  source 1..20: mol_type = other DNA
cccagctactcaggaggctg

SEQ ID NO: 11 - DNA, 20 bp, synthetic construct
  misc_feature 1..20: note = Synthetic Sequence
  source 1..20: mol_type = other DNA
agcactttgggaggccgagg

SEQ ID NO: 12 - DNA, 20 bp, synthetic construct
  misc_feature 1..20: note = Synthetic Sequence
  source 1..20: mol_type = other DNA
cctcagcctcccaagtagct

SEQ ID NO: 13 - DNA, 20 bp, synthetic construct
  misc_feature 1..20: note = Synthetic Sequence
  source 1..20: mol_type = other DNA
tttcaccatgttggccaggc

SEQ ID NO: 14 - DNA, 20 bp, synthetic construct
  misc_feature 1..20: note = Synthetic Sequence
  source 1..20: mol_type = other DNA
cccagctacttgggaggctg

SEQ ID NO: 15 - DNA, 20 bp, synthetic construct
  misc_feature 1..20: note = Synthetic Sequence
  source 1..20: mol_type = other DNA
gcctcagcctcctgagtagc

SEQ ID NO: 16 - DNA, 20 bp, synthetic construct
  misc_feature 1..20: note = Synthetic Sequence
  source 1..20: mol_type = other DNA
gcctcagcctcccaagtagc

SEQ ID NO: 17 - DNA, 20 bp, synthetic construct
  misc_feature 1..20: note = Synthetic Sequence
  source 1..20: mol_type = other DNA
gctactcaggaggctgaggc

SEQ ID NO: 18 - DNA, 20 bp, synthetic construct
  misc_feature 1..20: note = Synthetic Sequence
  source 1..20: mol_type = other DNA
cccagcactttgggaggcca

SEQ ID NO: 19 - DNA, 20 bp, synthetic construct
  misc_feature 1..20: note = Synthetic Sequence
  source 1..20: mol_type = other DNA
ctaaaaatacaaaaattagc

SEQ ID NO: 20 - DNA, 20 bp, synthetic construct
  misc_feature 1..20: note = Synthetic Sequence
  source 1..20: mol_type = other DNA
gctacttgggaggctgaggc

SEQ ID NO: 21 - DNA, 20 bp, synthetic construct
  misc_feature 1..20: note = Synthetic Sequence
  source 1..20: mol_type = other DNA
gcctgtagtcccagctactc

SEQ ID NO: 22 - DNA, 20 bp, synthetic construct
  misc_feature 1..20: note = Synthetic Sequence
  source 1..20: mol_type = other DNA
gcctgtaatcccagctactc

SEQ ID NO: 23 - DNA, 20 bp, synthetic construct
  misc_feature 1..20: note = Synthetic Sequence
  source 1..20: mol_type = other DNA
taaaaatacaaaaattagcc

SEQ ID NO: 24 - DNA, 20 bp, synthetic construct
  misc_feature 1..20: note = Synthetic Sequence
  source 1..20: mol_type = other DNA
gggaggctgaggcaggagaa

SEQ ID NO: 25 - DNA, 20 bp, synthetic construct
  misc_feature 1..20: note = Synthetic Sequence
  source 1..20: mol_type = other DNA
tcaggagatcgagaccatcc

SEQ ID NO: 26 - DNA, 20 bp, synthetic construct
  misc_feature 1..20: note = Synthetic Sequence
  source 1..20: mol_type = other DNA
tcccgagtagctgggactac

SEQ ID NO: 27 - DNA, 20 bp, synthetic construct
  misc_feature 1..20: note = Synthetic Sequence
  source 1..20: mol_type = other DNA
tgtagtcccagctactcggg

SEQ ID NO: 28 - DNA, 20 bp, synthetic construct
  misc_feature 1..20: note = Synthetic Sequence
  source 1..20: mol_type = other DNA
taaaaatacaaaaattagct

SEQ ID NO: 29 - DNA, 20 bp, synthetic construct
  misc_feature 1..20: note = Synthetic Sequence
  source 1..20: mol_type = other DNA
agcactttgggaggccaagg

SEQ ID NO: 30 - DNA, 20 bp, synthetic construct
  misc_feature 1..20: note = Synthetic Sequence
  source 1..20: mol_type = other DNA
tcctgagtagctgggattac

SEQ ID NO: 31 - DNA, 20 bp, synthetic construct
  misc_feature 1..20: note = Synthetic Sequence
  source 1..20: mol_type = other DNA
tcaggagttcgagaccagcc

SEQ ID NO: 32 - DNA, 20 bp, synthetic construct
  misc_feature 1..20: note = Synthetic Sequence
  source 1..20: mol_type = other DNA
aaaaatacaaaaaattagcc

SEQ ID NO: 33 - DNA, 20 bp, synthetic construct
  misc_feature 1..20: note = Synthetic Sequence
  source 1..20: mol_type = other DNA
tgtaatcccagctactcagg

SEQ ID NO: 34 - DNA, 20 bp, synthetic construct
  misc_feature 1..20: note = Synthetic Sequence
  source 1..20: mol_type = other DNA
tcaggagttcaagaccagcc

SEQ ID NO: 35 - DNA, 20 bp, synthetic construct
  misc_feature 1..20: note = Synthetic Sequence
  source 1..20: mol_type = other DNA
taaaaatacaaaaaattagc

SEQ ID NO: 36 - DNA, 20 bp, synthetic construct
  misc_feature 1..20: note = Synthetic Sequence
  source 1..20: mol_type = other DNA
tcccaagtagctgggattac

SEQ ID NO: 37 - DNA, 20 bp, synthetic construct
  misc_feature 1..20: note = Synthetic Sequence
  source 1..20: mol_type = other DNA
tgtaatcccagctacttggg

SEQ ID NO: 38 - DNA, 20 bp, synthetic construct
  misc_feature 1..20: note = Synthetic Sequence
  source 1..20: mol_type = other DNA
tcccgagtagctgggattac

SEQ ID NO: 39 - DNA, 20 bp, synthetic construct
  misc_feature 1..20: note = Synthetic Sequence
  source 1..20: mol_type = other DNA
gagatggggtttcaccatgt

SEQ ID NO: 40 - DNA, 20 bp, synthetic construct
  misc_feature 1..20: note = Synthetic Sequence
  source 1..20: mol_type = other DNA
tgtaatcccagctactcggg

SEQ ID NO: 41 - DNA, 20 bp, synthetic construct
  misc_feature 1..20: note = Synthetic Sequence
  source 1..20: mol_type = other DNA
caggagaatcgcttgaaccc

SEQ ID NO: 42 - DNA, 20 bp, synthetic construct
  misc_feature 1..20: note = Synthetic Sequence
  source 1..20: mol_type = other DNA
gcaggagaatcgcttgaacc

SEQ ID NO: 43 - DNA, 20 bp, synthetic construct
  misc_feature 1..20: note = Synthetic Sequence
  source 1..20: mol_type = other DNA
cgagaccagcctggccaaca

SEQ ID NO: 44 - DNA, 20 bp, synthetic construct
  misc_feature 1..20: note = Synthetic Sequence
  source 1..20: mol_type = other DNA
tcaggagtttgagaccagcc

SEQ ID NO: 45 - DNA, 20 bp, synthetic construct
  misc_feature 1..20: note = Synthetic Sequence
  source 1..20: mol_type = other DNA
cgagaccatcctggctaaca

SEQ ID NO: 46 - DNA, 20 bp, synthetic construct
  misc_feature 1..20: note = Synthetic Sequence
  source 1..20: mol_type = other DNA
caggagaatggcgtgaaccc

SEQ ID NO: 47 - DNA, 20 bp, synthetic construct
  misc_feature 1..20: note = Synthetic Sequence
  source 1..20: mol_type = other DNA
gcaggagaatggcgtgaacc

SEQ ID NO: 48 - DNA, 20 bp, synthetic construct
  misc_feature 1..20: note = Synthetic Sequence
  source 1..20: mol_type = other DNA
tttcaccgtgttagccagga

SEQ ID NO: 49 - DNA, 20 bp, synthetic construct
  misc_feature 1..20: note = Synthetic Sequence
  source 1..20: mol_type = other DNA
tcccaagtagctgggactac

SEQ ID NO: 50 - DNA, 20 bp, synthetic construct
  misc_feature 1..20: note = Synthetic Sequence
  source 1..20: mol_type = other DNA
tgtagtcccagctacttggg

SEQ ID NO: 51 - DNA, 20 bp, synthetic construct
  misc_feature 1..20: note = Synthetic Sequence
  source 1..20: mol_type = other DNA
tcctgagtagctgggactac

SEQ ID NO: 52 - DNA, 20 bp, synthetic construct
  misc_feature 1..20: note = Synthetic Sequence
  source 1..20: mol_type = other DNA
caagaccagcctggccaaca

SEQ ID NO: 53 - DNA, 20 bp, synthetic construct
  misc_feature 1..20: note = Synthetic Sequence
  source 1..20: mol_type = other DNA
tgtagtcccagctactcagg

SEQ ID NO: 54 - DNA, 20 bp, synthetic construct
  misc_feature 1..20: note = Synthetic Sequence
  source 1..20: mol_type = other DNA
gagacggggtttcaccatgt

SEQ ID NO: 55 - DNA, 20 bp, synthetic construct
  misc_feature 1..20: note = Synthetic Sequence
  source 1..20: mol_type = other DNA
caggagaatcacttgaaccc

SEQ ID NO: 56 - DNA, 20 bp, synthetic construct
  misc_feature 1..20: note = Synthetic Sequence
  source 1..20: mol_type = other DNA
cactgcaagctccgcctccc

SEQ ID NO: 57 - DNA, 20 bp, synthetic construct
  misc_feature 1..20: note = Synthetic Sequence
  source 1..20: mol_type = other DNA
gcctgtaatcccagctactt

SEQ ID NO: 58 - DNA, 20 bp, synthetic construct
  misc_feature 1..20: note = Synthetic Sequence
  source 1..20: mol_type = other DNA
gcaggagaatcacttgaacc

SEQ ID NO: 59 - DNA, 20 bp, synthetic construct
  misc_feature 1..20: note = Synthetic Sequence
  source 1..20: mol_type = other DNA
gagacagggtttcaccatgt

SEQ ID NO: 60 - DNA, 20 bp, synthetic construct
  misc_feature 1..20: note = Synthetic Sequence
  source 1..20: mol_type = other DNA
tgagaccagcctggccaaca

SEQ ID NO: 61 - DNA, 20 bp, synthetic construct
  misc_feature 1..20: note = Synthetic Sequence
  source 1..20: mol_type = other DNA
gcaggagaattgcttgaacc

SEQ ID NO: 62 - DNA, 20 bp, synthetic construct
  misc_feature 1..20: note = Synthetic Sequence
  source 1..20: mol_type = other DNA
caggagaattgcttgaaccc

SEQ ID NO: 63 - DNA, 20 bp, synthetic construct
  misc_feature 1..20: note = Synthetic Sequence
  source 1..20: mol_type = other DNA
acctcagcctcccaaagtgc

SEQ ID NO: 64 - DNA, 20 bp, synthetic construct
  misc_feature 1..20: note = Synthetic Sequence
  source 1..20: mol_type = other DNA
gcctgtagtcccagctactt

SEQ ID NO: 65 - DNA, 20 bp, synthetic construct
  misc_feature 1..20: note = Synthetic Sequence
  source 1..20: mol_type = other DNA
gagaatggcgtgaacccggg

SEQ ID NO: 66 - DNA, 20 bp, synthetic construct
  misc_feature 1..20: note = Synthetic Sequence
  source 1..20: mol_type = other DNA
acctgtaatcccagctactc

SEQ ID NO: 67 - DNA, 20 bp, synthetic construct
  misc_feature 1..20: note = Synthetic Sequence
  source 1..20: mol_type = other DNA
acctgtagtcccagctactc

SEQ ID NO: 68 - DNA, 20 bp, synthetic construct
  misc_feature 1..20: note = Synthetic Sequence
  source 1..20: mol_type = other DNA
gagaatcgcttgaacccagg

SEQ ID NO: 69 - DNA, 20 bp, synthetic construct
  misc_feature 1..20: note = Synthetic Sequence
  source 1..20: mol_type = other DNA
ggtctcaaactcctgacctc

SEQ ID NO: 70 - DNA, 20 bp, synthetic construct
  misc_feature 1..20: note = Synthetic Sequence
  source 1..20: mol_type = other DNA
caggagaatcgcttgaacct

SEQ ID NO: 71 - DNA, 20 bp, synthetic construct
  misc_feature 1..20: note = Synthetic Sequence
  source 1..20: mol_type = other DNA
gagaatcgcttgaacctggg

SEQ ID NO: 72 - DNA, 20 bp, synthetic construct
  misc_feature 1..20: note = Synthetic Sequence
  source 1..20: mol_type = other DNA
tttcaccatgttagccagga

SEQ ID NO: 73 - DNA, 20 bp, synthetic construct
  misc_feature 1..20: note = Synthetic Sequence
  source 1..20: mol_type = other DNA
gagaatcacttgaacccagg

SEQ ID NO: 74 - DNA, 20 bp, synthetic construct
  misc_feature 1..20: note = Synthetic Sequence
  source 1..20: mol_type = other DNA
gagaatcacttgaacctggg

SEQ ID NO: 75 - DNA, 20 bp, synthetic construct
  misc_feature 1..20: note = Synthetic Sequence
  source 1..20: mol_type = other DNA
caggagaatcacttgaacct

SEQ ID NO: 76 - DNA, 20 bp, synthetic construct
  misc_feature 1..20: note = Synthetic Sequence
  source 1..20: mol_type = other DNA
ttgggtatatacccagtaat

SEQ ID NO: 77 - DNA, 20 bp, synthetic construct
  misc_feature 1..20: note = Synthetic Sequence
  source 1..20: mol_type = other DNA
tattcacaatagcaaagact

SEQ ID NO: 78 - DNA, 20 bp, synthetic construct
  misc_feature 1..20: note = Synthetic Sequence
  source 1..20: mol_type = other DNA
gagaattgcttgaacctggg

SEQ ID NO: 79 - DNA, 20 bp, synthetic construct
  misc_feature 1..20: note = Synthetic Sequence
  source 1..20: mol_type = other DNA
atacaaaaattagctgggca

SEQ ID NO: 80 - DNA, 20 bp, synthetic construct
  misc_feature 1..20: note = Synthetic Sequence
  source 1..20: mol_type = other DNA
tagactggattaagaaaatg

SEQ ID NO: 81 - DNA, 20 bp, synthetic construct
  misc_feature 1..20: note = Synthetic Sequence
  source 1..20: mol_type = other DNA
caaaaattagctgggcatgg

SEQ ID NO: 82 - DNA, 20 bp, synthetic construct
  misc_feature 1..20: note = Synthetic Sequence
  source 1..20: mol_type = other DNA
gagaattgcttgaacccagg

SEQ ID NO: 83 - DNA, 20 bp, synthetic construct
  misc_feature 1..20: note = Synthetic Sequence
  source 1..20: mol_type = other DNA
gagaatcgcttgaacccggg

SEQ ID NO: 84 - DNA, 20 bp, synthetic construct
  misc_feature 1..20: note = Synthetic Sequence
  source 1..20: mol_type = other DNA
attactgggtatatacccaa

SEQ ID NO: 85 - DNA, 20 bp, synthetic construct
  misc_feature 1..20: note = Synthetic Sequence
  source 1..20: mol_type = other DNA
caggagaattgcttgaacct

SEQ ID NO: 86 - DNA, 20 bp, synthetic construct
  misc_feature 1..20: note = Synthetic Sequence
  source 1..20: mol_type = other DNA
tttcaccatgttggtcaggc

SEQ ID NO: 87 - DNA, 20 bp, synthetic construct
  misc_feature 1..20: note = Synthetic Sequence
  source 1..20: mol_type = other DNA
tggagaggatgtggagaaat

SEQ ID NO: 88 - DNA, 20 bp, synthetic construct
  misc_feature 1..20: note = Synthetic Sequence
  source 1..20: mol_type = other DNA
aaaaatacaaaaaattagct

SEQ ID NO: 89 - DNA, 20 bp, synthetic construct
  misc_feature 1..20: note = Synthetic Sequence
  source 1..20: mol_type = other DNA
tttcaccatgttggccagga

SEQ ID NO: 90 - DNA, 20 bp, synthetic construct
  misc_feature 1..20: note = Synthetic Sequence
  source 1..20: mol_type = other DNA
aaaaaattagccgggcgtgg

SEQ ID NO: 91 - DNA, 20 bp, synthetic construct
  misc_feature 1..20: note = Synthetic Sequence
  source 1..20: mol_type = other DNA
cgagaccagcctgaccaaca

SEQ ID NO: 92 - DNA, 20 bp, synthetic construct
  misc_feature 1..20: note = Synthetic Sequence
  source 1..20: mol_type = other DNA
aggaggctgaggcaggagaa

SEQ ID NO: 93 - DNA, 20 bp, synthetic construct
  misc_feature 1..20: note = Synthetic Sequence
  source 1..20: mol_type = other DNA
atgagttcatgtcctttgta

SEQ ID NO: 94 - DNA, 20 bp, synthetic construct
  misc_feature 1..20: note = Synthetic Sequence
  source 1..20: mol_type = other DNA
gatgagttcatgtcctttgt

SEQ ID NO: 95 - DNA, 20 bp, synthetic construct
  misc_feature 1..20: note = Synthetic Sequence
  source 1..20: mol_type = other DNA
atacaaaaattagccaggca

SEQ ID NO: 96 - DNA, 20 bp, synthetic construct
  misc_feature 1..20: note = Synthetic Sequence
  source 1..20: mol_type = other DNA
tacaaaaaattagccgggcg

SEQ ID NO: 97 - DNA, 20 bp, synthetic construct
  misc_feature 1..20: note = Synthetic Sequence
  source 1..20: mol_type = other DNA
caaaaattagccaggcatgg

SEQ ID NO: 98 - DNA, 20 bp, synthetic construct
  misc_feature 1..20: note = Synthetic Sequence
  source 1..20: mol_type = other DNA
aatgggatggctgggtcaaa

SEQ ID NO: 99 - DNA, 20 bp, synthetic construct
  misc_feature 1..20: note = Synthetic Sequence
  source 1..20: mol_type = other DNA
tgacccagccatcccattac

SEQ ID NO: 100 - DNA, 20 bp, synthetic construct
  misc_feature 1..20: note = Synthetic Sequence
  source 1..20: mol_type = other DNA
aacaggtgctggagaggatg

SEQ ID NO: 101 - DNA, 20 bp, synthetic construct
  misc_feature 1..20: note = Synthetic Sequence
  source 1..20: mol_type = other DNA
ggaaacaacaggtgctggag

SEQ ID NO: 102 - DNA, 20 bp, synthetic construct
  misc_feature 1..20: note = Synthetic Sequence
  source 1..20: mol_type = other DNA
gacccagccatcccattact

SEQ ID NO: 103 - DNA, 20 bp, synthetic construct
  misc_feature 1..20: note = Synthetic Sequence
  source 1..20: mol_type = other DNA
agtcaggaaacaacaggtgc

SEQ ID NO: 104 - DNA, 20 bp, synthetic construct
  misc_feature 1..20: note = Synthetic Sequence
  source 1..20: mol_type = other DNA
tttgatttgcatttctctga

SEQ ID NO: 105 - DNA, 20 bp, synthetic construct
  misc_feature 1..20: note = Synthetic Sequence
  source 1..20: mol_type = other DNA
atacccagtaatgggatggc

SEQ ID NO: 106 - DNA, 20 bp, synthetic construct
  misc_feature 1..20: note = Synthetic Sequence
  source 1..20: mol_type = other DNA
atacaaaaattagctgggtg

SEQ ID NO: 107 - DNA, 20 bp, synthetic construct
  misc_feature 1..20: note = Synthetic Sequence
  source 1..20: mol_type = other DNA
tacccagtaatgggatggct

SEQ ID NO: 108 - DNA, 20 bp, synthetic construct
  misc_feature 1..20: note = Synthetic Sequence
  source 1..20: mol_type = other DNA
atacaaaaattagctgggcg

SEQ ID NO: 109 - DNA, 20 bp, synthetic construct
  misc_feature 1..20: note = Synthetic Sequence
  source 1..20: mol_type = other DNA
aattagccgggcgtggtggc

SEQ ID NO: 110 - DNA, 20 bp, synthetic construct
  misc_feature 1..20: note = Synthetic Sequence
  source 1..20: mol_type = other DNA
caaaaattagctgggtgtgg

SEQ ID NO: 111 - DNA, 20 bp, synthetic construct
  misc_feature 1..20: note = Synthetic Sequence
  source 1..20: mol_type = other DNA
aaattagccgggcgtggtgg

SEQ ID NO: 112 - DNA, 20 bp, synthetic construct
  misc_feature 1..20: note = Synthetic Sequence
  source 1..20: mol_type = other DNA
tttcactgtgttagccagga

SEQ ID NO: 113 - DNA, 20 bp, synthetic construct
  misc_feature 1..20: note = Synthetic Sequence
  source 1..20: mol_type = other DNA
gtatatacccagtaatggga

SEQ ID NO: 114 - DNA, 20 bp, synthetic construct
  misc_feature 1..20: note = Synthetic Sequence
  source 1..20: mol_type = other DNA
caaaaattagctgggcgtgg

SEQ ID NO: 115 - DNA, 20 bp, synthetic construct
  misc_feature 1..20: note = Synthetic Sequence
  source 1..20: mol_type = other DNA
gtaaactagttcaaccattg

SEQ ID NO: 116 - DNA, 20 bp, synthetic construct
  misc_feature 1..20: note = Synthetic Sequence
  source 1..20: mol_type = other DNA
caatgagaacacatggacac

SEQ ID NO: 117 - DNA, 20 bp, synthetic construct
  misc_feature 1..20: note = Synthetic Sequence
  source 1..20: mol_type = other DNA
aaaaccctagaagaaaacct

SEQ ID NO: 118 - DNA, 20 bp, synthetic construct
  misc_feature 1..20: note = Synthetic Sequence
  source 1..20: mol_type = other DNA
gagaatcacttgaacccggg

SEQ ID NO: 119 - DNA, 20 bp, synthetic construct
  misc_feature 1..20: note = Synthetic Sequence
  source 1..20: mol_type = other DNA
aaacaaccccatcaaaaagt

SEQ ID NO: 120 - DNA, 20 bp, synthetic construct
  misc_feature 1..20: note = Synthetic Sequence
  source 1..20: mol_type = other DNA
tcaggagatcaagaccatcc

SEQ ID NO: 121 - DNA, 20 bp, synthetic construct
  misc_feature 1..20: note = Synthetic Sequence
  source 1..20: mol_type = other DNA
tgtgagatggtatctcattg

SEQ ID NO: 122 - DNA, 20 bp, synthetic construct
  misc_feature 1..20: note = Synthetic Sequence
  source 1..20: mol_type = other DNA
gagaattgcttgaacccggg

SEQ ID NO: 123 - DNA, 20 bp, synthetic construct
  misc_feature 1..20: note = Synthetic Sequence
  source 1..20: mol_type = other DNA
aaaatacaaaaaaattagcc

SEQ ID NO: 124 - DNA, 20 bp, synthetic construct
  misc_feature 1..20: note = Synthetic Sequence
  source 1..20: mol_type = other DNA
tcaggagattgagaccatcc

SEQ ID NO: 125 - DNA, 20 bp, synthetic construct
  misc_feature 1..20: note = Synthetic Sequence
  source 1..20: mol_type = other DNA
gccgaggcgggcggatcacg

SEQ ID NO: 126 - DNA, 20 bp, synthetic construct
  misc_feature 1..20: note = Synthetic Sequence
  source 1..20: mol_type = other DNA
aatcacttgaacccaggagg

SEQ ID NO: 127 - DNA, 20 bp, synthetic construct
  misc_feature 1..20: note = Synthetic Sequence
  source 1..20: mol_type = other DNA
ttaatccagtctatcattgt

SEQ ID NO: 128 - DNA, 20 bp, synthetic construct
  misc_feature 1..20: note = Synthetic Sequence
  source 1..20: mol_type = other DNA
tttgtataaggtgtaaggaa

SEQ ID NO: 129 - DNA, 20 bp, synthetic construct
  misc_feature 1..20: note = Synthetic Sequence
  source 1..20: mol_type = other DNA
ataaatggtgctgggaaaac

SEQ ID NO: 130 - DNA, 20 bp, synthetic construct
  misc_feature 1..20: note = Synthetic Sequence
  source 1..20: mol_type = other DNA
taaccaaaacagcatggtac

SEQ ID NO: 131 - DNA, 20 bp, synthetic construct
  misc_feature 1..20: note = Synthetic Sequence
  source 1..20: mol_type = other DNA
aaaaatacaaaaaaattagc

SEQ ID NO: 132 - DNA, 20 bp, synthetic construct
  misc_feature 1..20: note = Synthetic Sequence
  source 1..20: mol_type = other DNA
ttgtagtatagtttgaagtc

SEQ ID NO: 133 - DNA, 20 bp, synthetic construct
  misc_feature 1..20: note = Synthetic Sequence
  source 1..20: mol_type = other DNA
aggattccctatttaataaa

SEQ ID NO: 134 - DNA, 20 bp, synthetic construct
  misc_feature 1..20: note = Synthetic Sequence
  source 1..20: mol_type = other DNA
ctacagtaaccaaaacagca

SEQ ID NO: 135 - DNA, 20 bp, synthetic construct
  misc_feature 1..20: note = Synthetic Sequence
  source 1..20: mol_type = other DNA
tttctagttctagatccctg

SEQ ID NO: 136 - DNA, 20 bp, synthetic construct
  misc_feature 1..20: note = Synthetic Sequence
  source 1..20: mol_type = other DNA
cctatttaataaatggtgct

SEQ ID NO: 137 - DNA, 20 bp, synthetic construct
  misc_feature 1..20: note = Synthetic Sequence
  source 1..20: mol_type = other DNA
gtctatcattgttggacatt

SEQ ID NO: 138 - DNA, 20 bp, synthetic construct
  misc_feature 1..20: note = Synthetic Sequence
  source 1..20: mol_type = other DNA
ccagcaccatttattaaata

SEQ ID NO: 139 - DNA, 20 bp, synthetic construct
  misc_feature 1..20: note = Synthetic Sequence
  source 1..20: mol_type = other DNA
gtaccagtaccatgctgttt

SEQ ID NO: 140 - DNA, 20 bp, synthetic construct
  misc_feature 1..20: note = Synthetic Sequence
  source 1..20: mol_type = other DNA
cccagcaccatttattaaat

SEQ ID NO: 141 - DNA, 20 bp, synthetic construct
  misc_feature 1..20: note = Synthetic Sequence
  source 1..20: mol_type = other DNA
aatcacttgaacctgggagg

SEQ ID NO: 142 - DNA, 20 bp, synthetic construct
  misc_feature 1..20: note = Synthetic Sequence
  source 1..20: mol_type = other DNA
aaactaccatcagagtgaac

SEQ ID NO: 143 - DNA, 20 bp, synthetic construct
  misc_feature 1..20: note = Synthetic Sequence
  source 1..20: mol_type = other DNA
ccctatttaataaatggtgc

SEQ ID NO: 144 - DNA, 20 bp, synthetic construct
  misc_feature 1..20: note = Synthetic Sequence
  source 1..20: mol_type = other DNA
ctcaggtgatccacctgcct

SEQ ID NO: 145 - DNA, 20 bp, synthetic construct
  misc_feature 1..20: note = Synthetic Sequence
  source 1..20: mol_type = other DNA
gtttgtagttctccttgaag

SEQ ID NO: 146 - DNA, 20 bp, synthetic construct
  misc_feature 1..20: note = Synthetic Sequence
  source 1..20: mol_type = other DNA
tctatcattgttggacattt

SEQ ID NO: 147 - DNA, 20 bp, synthetic construct
  misc_feature 1..20: note = Synthetic Sequence
  source 1..20: mol_type = other DNA
catatgtagaaagctgaaac

SEQ ID NO: 148 - DNA, 20 bp, synthetic construct
  misc_feature 1..20: note = Synthetic Sequence
  source 1..20: mol_type = other DNA
aaaagccaaaattgacaaat

SEQ ID NO: 149 - DNA, 20 bp, synthetic construct
  misc_feature 1..20: note = Synthetic Sequence
  source 1..20: mol_type = other DNA
caaaagccaaaattgacaaa

SEQ ID NO: 150 - DNA, 20 bp, synthetic construct
  misc_feature 1..20: note = Synthetic Sequence
  source 1..20: mol_type = other DNA
tagatcccatttgtcaattt

SEQ ID NO: 151 - DNA, 20 bp, synthetic construct
  misc_feature 1..20: note = Synthetic Sequence
  source 1..20: mol_type = other DNA
atacaaaaattagccaggtg

SEQ ID NO: 152 - DNA, 20 bp, synthetic construct
  misc_feature 1..20: note = Synthetic Sequence
  source 1..20: mol_type = other DNA
caaaaattagccaggtgtgg

SEQ ID NO: 153 - DNA, 20 bp, synthetic construct
  misc_feature 1..20: note = Synthetic Sequence
  source 1..20: mol_type = other DNA
atacaaaaattagccaggcg

SEQ ID NO: 154 - DNA, 20 bp, synthetic construct
  misc_feature 1..20: note = Synthetic Sequence
  source 1..20: mol_type = other DNA
aaccattgtggaagtcagtg

SEQ ID NO: 155 - DNA, 20 bp, synthetic construct
  misc_feature 1..20: note = Synthetic Sequence
  source 1..20: mol_type = other DNA
caaacaaccccatcaaaaag

SEQ ID NO: 156 - DNA, 20 bp, synthetic construct
  misc_feature 1..20: note = Synthetic Sequence
  source 1..20: mol_type = other DNA
caggagaatggcatgaaccc

SEQ ID NO: 157 - DNA, 20 bp, synthetic construct
  misc_feature 1..20: note = Synthetic Sequence
  source 1..20: mol_type = other DNA
ctcaggtgatccacccacct

SEQ ID NO: 158 - DNA, 20 bp, synthetic construct
  misc_feature 1..20: note = Synthetic Sequence
  source 1..20: mol_type = other DNA
caaaaattagccaggcgtgg

SEQ ID NO: 159 - DNA, 20 bp, synthetic construct
  misc_feature 1..20: note = Synthetic Sequence
  source 1..20: mol_type = other DNA
agcaacttcagcaaagtctc

SEQ ID NO: 160 - DNA, 20 bp, synthetic construct
  misc_feature 1..20: note = Synthetic Sequence
  source 1..20: mol_type = other DNA
gcaggagaatggcatgaacc

SEQ ID NO: 161 - DNA, 20 bp, synthetic construct
  misc_feature 1..20: note = Synthetic Sequence
  source 1..20: mol_type = other DNA
agaacacatggacacaggaa

SEQ ID NO: 162 - DNA, 20 bp, synthetic construct
  misc_feature 1..20: note = Synthetic Sequence
  source 1..20: mol_type = other DNA
gaacacatggacacaggaag

SEQ ID NO: 163 - DNA, 20 bp, synthetic construct
  misc_feature 1..20: note = Synthetic Sequence
  source 1..20: mol_type = other DNA
gagaacacatggacacagga

SEQ ID NO: 164 - DNA, 20 bp, synthetic construct
  misc_feature 1..20: note = Synthetic Sequence
  source 1..20: mol_type = other DNA
tttcatccatgtccctacaa

SEQ ID NO: 165 - DNA, 20 bp, synthetic construct
  misc_feature 1..20: note = Synthetic Sequence
  source 1..20: mol_type = other DNA
tgaagttgcttatcagctta

SEQ ID NO: 166 - DNA, 20 bp, synthetic construct
  misc_feature 1..20: note = Synthetic Sequence
  source 1..20: mol_type = other DNA
gaaaaaatgctcatcatcac

SEQ ID NO: 167 - DNA, 20 bp, synthetic construct
  misc_feature 1..20: note = Synthetic Sequence
  source 1..20: mol_type = other DNA
aattagccaggcgtggtggc

SEQ ID NO: 168 - DNA, 20 bp, synthetic construct
  misc_feature 1..20: note = Synthetic Sequence
  source 1..20: mol_type = other DNA
tatgtatacatgtgccatgt

SEQ ID NO: 169 - DNA, 20 bp, synthetic construct
  misc_feature 1..20: note = Synthetic Sequence
  source 1..20: mol_type = other DNA
ctaagccaaaagaacaaagc

SEQ ID NO: 170 - DNA, 20 bp, synthetic construct
  misc_feature 1..20: note = Synthetic Sequence
  source 1..20: mol_type = other DNA
tgagaccagcctgaccaaca

SEQ ID NO: 171 - DNA, 20 bp, synthetic construct
  misc_feature 1..20: note = Synthetic Sequence
  source 1..20: mol_type = other DNA
gagaatggcgtgaacccagg

SEQ ID NO: 172 - DNA, 20 bp, synthetic construct
  misc_feature 1..20: note = Synthetic Sequence
  source 1..20: mol_type = other DNA
gaagcattccctttgaaaac

SEQ ID NO: 173 - DNA, 20 bp, synthetic construct
  misc_feature 1..20: note = Synthetic Sequence
  source 1..20: mol_type = other DNA
agccaaaagaacaaagctgg

SEQ ID NO: 174 - DNA, 20 bp, synthetic construct
  misc_feature 1..20: note = Synthetic Sequence
  source 1..20: mol_type = other DNA
gtctaaaacaccaaaagcaa

SEQ ID NO: 175 - DNA, 20 bp, synthetic construct
  misc_feature 1..20: note = Synthetic Sequence
  source 1..20: mol_type = other DNA
ttgaataggagtggtgagag

SEQ ID NO: 176 - DNA, 20 bp, synthetic construct
  misc_feature 1..20: note = Synthetic Sequence
  source 1..20: mol_type = other DNA
aaattagccaggcgtggtgg

SEQ ID NO: 177 - DNA, 20 bp, synthetic construct
  misc_feature 1..20: note = Synthetic Sequence
  source 1..20: mol_type = other DNA
tttgagttcattgtagattc

SEQ ID NO: 178 - DNA, 20 bp, synthetic construct
  misc_feature 1..20: note = Synthetic Sequence
  source 1..20: mol_type = other DNA
atggcaatcattaaaaagtc

SEQ ID NO: 179 - DNA, 20 bp, synthetic construct
  misc_feature 1..20: note = Synthetic Sequence
  source 1..20: mol_type = other DNA
ggaagaacattccatgctca

SEQ ID NO: 180 - DNA, 20 bp, synthetic construct
  misc_feature 1..20: note = Synthetic Sequence
  source 1..20: mol_type = other DNA
tgaataggagtggtgagaga

SEQ ID NO: 181 - DNA, 20 bp, synthetic construct
  misc_feature 1..20: note = Synthetic Sequence
  source 1..20: mol_type = other DNA
cgcttgaacccaggaggcag

SEQ ID NO: 182 - DNA, 20 bp, synthetic construct
  misc_feature 1..20: note = Synthetic Sequence
  source 1..20: mol_type = other DNA
acagccaatatcatactgaa

SEQ ID NO: 183 - DNA, 20 bp, synthetic construct
  misc_feature 1..20: note = Synthetic Sequence
  source 1..20: mol_type = other DNA
attcagtatgatattggctg

SEQ ID NO: 184 - DNA, 20 bp, synthetic construct
  misc_feature 1..20: note = Synthetic Sequence
  source 1..20: mol_type = other DNA
ctcaggtgatccacccgcct

SEQ ID NO: 185 - DNA, 20 bp, synthetic construct
  misc_feature 1..20: note = Synthetic Sequence
  source 1..20: mol_type = other DNA
ttatcagcttaaggagattt

SEQ ID NO: 186 - DNA, 20 bp, synthetic construct
  misc_feature 1..20: note = Synthetic Sequence
  source 1..20: mol_type = other DNA
ttaatgattgccattctaac

SEQ ID NO: 187 - DNA, 20 bp, synthetic construct
  misc_feature 1..20: note = Synthetic Sequence
  source 1..20: mol_type = other DNA
tatgtatacatgtgccatgc

SEQ ID NO: 188 - DNA, 20 bp, synthetic construct
  misc_feature 1..20: note = Synthetic Sequence
  source 1..20: mol_type = other DNA
ttcagtatgatattggctgt

SEQ ID NO: 189 - DNA, 20 bp, synthetic construct
  misc_feature 1..20: note = Synthetic Sequence
  source 1..20: mol_type = other DNA
aattagctgggcgtggtggc

SEQ ID NO: 190 - DNA, 20 bp, synthetic construct
  misc_feature 1..20: note = Synthetic Sequence
  source 1..20: mol_type = other DNA
aattgaacaatgagaacaca

SEQ ID NO: 191 - DNA, 20 bp, synthetic construct
  misc_feature 1..20: note = Synthetic Sequence
  source 1..20: mol_type = other DNA
caggagaatggcgtgaacct

SEQ ID NO: 192 - DNA, 20 bp, synthetic construct
  misc_feature 1..20: note = Synthetic Sequence
  source 1..20: mol_type = other DNA
tttcaccatattggccaggc

SEQ ID NO: 193 - DNA, 20 bp, synthetic construct
  misc_feature 1..20: note = Synthetic Sequence
  source 1..20: mol_type = other DNA
caagaccatcctggctaaca

SEQ ID NO: 194 - DNA, 20 bp, synthetic construct
  misc_feature 1..20: note = Synthetic Sequence
  source 1..20: mol_type = other DNA
ttgcccattcagtatgatat

SEQ ID NO: 195 - DNA, 20 bp, synthetic construct
  misc_feature 1..20: note = Synthetic Sequence
  source 1..20: mol_type = other DNA
aaattagctgggcgtggtgg

SEQ ID NO: 196 - DNA, 20 bp, synthetic construct
  misc_feature 1..20: note = Synthetic Sequence
  source 1..20: mol_type = other DNA
gagaatggcgtgaacctggg

SEQ ID NO: 197 - DNA, 20 bp, synthetic construct
  misc_feature 1..20: note = Synthetic Sequence
  source 1..20: mol_type = other DNA
ttgaaaactggcacaagaca

SEQ ID NO: 198 - DNA, 20 bp, synthetic construct
  misc_feature 1..20: note = Synthetic Sequence
  source 1..20: mol_type = other DNA
ggtacatgtgcacaatgtgc

SEQ ID NO: 199 - DNA, 20 bp, synthetic construct
  misc_feature 1..20: note = Synthetic Sequence
  source 1..20: mol_type = other DNA
cagccaatatcatactgaat

SEQ ID NO: 200 - DNA, 20 bp, synthetic construct
  misc_feature 1..20: note = Synthetic Sequence
  source 1..20: mol_type = other DNA
atgcacacgtatgtttattg

SEQ ID NO: 201 - DNA, 20 bp, synthetic construct
  misc_feature 1..20: note = Synthetic Sequence
  source 1..20: mol_type = other DNA
gtcagtgtggcgattcctca

SEQ ID NO: 202 - DNA, 20 bp, synthetic construct
  misc_feature 1..20: note = Synthetic Sequence
  source 1..20: mol_type = other DNA
actagaaaatctagaagaaa

SEQ ID NO: 203 - DNA, 20 bp, synthetic construct
  misc_feature 1..20: note = Synthetic Sequence
  source 1..20: mol_type = other DNA
tgagaccatcctggctaaca

SEQ ID NO: 204 - DNA, 20 bp, synthetic construct
  misc_feature 1..20: note = Synthetic Sequence
  source 1..20: mol_type = other DNA
cacttgaacccaggaggcag

SEQ ID NO: 205 - DNA, 20 bp, synthetic construct
  misc_feature 1..20: note = Synthetic Sequence
  source 1..20: mol_type = other DNA
agtcagtgtggcgattcctc

SEQ ID NO: 206 - DNA, 20 bp, synthetic construct
  misc_feature 1..20: note = Synthetic Sequence
  source 1..20: mol_type = other DNA
cgccacactgacttccacaa

SEQ ID NO: 207 - DNA, 20 bp, synthetic construct
  misc_feature 1..20: note = Synthetic Sequence
  source 1..20: mol_type = other DNA
catctattgagataatcatg

SEQ ID NO: 208 - DNA, 20 bp, synthetic construct
  misc_feature 1..20: note = Synthetic Sequence
  source 1..20: mol_type = other DNA
cactgcaagctccgcctcct

SEQ ID NO: 209 - DNA, 20 bp, synthetic construct
  misc_feature 1..20: note = Synthetic Sequence
  source 1..20: mol_type = other DNA
tggaatagtttcagaaggaa

SEQ ID NO: 210 - DNA, 20 bp, synthetic construct
  misc_feature 1..20: note = Synthetic Sequence
  source 1..20: mol_type = other DNA
catactgaatgggcaaaaac

SEQ ID NO: 211 - DNA, 20 bp, synthetic construct
  misc_feature 1..20: note = Synthetic Sequence
  source 1..20: mol_type = other DNA
tgtagggacatggatgaaat

SEQ ID NO: 212 - DNA, 20 bp, synthetic construct
  misc_feature 1..20: note = Synthetic Sequence
  source 1..20: mol_type = other DNA
cgcttgaacctgggaggcag

SEQ ID NO: 213 - DNA, 20 bp, synthetic construct
  misc_feature 1..20: note = Synthetic Sequence
  source 1..20: mol_type = other DNA
aatcacttgaacccgggagg

SEQ ID NO: 214 - DNA, 20 bp, synthetic construct
  misc_feature 1..20: note = Synthetic Sequence
  source 1..20: mol_type = other DNA
caggagaatggtgtgaaccc

SEQ ID NO: 215 - DNA, 20 bp, synthetic construct
  misc_feature 1..20: note = Synthetic Sequence
  source 1..20: mol_type = other DNA
cgagaccatcctggccaaca

SEQ ID NO: 216 - DNA, 20 bp, synthetic construct
  misc_feature 1..20: note = Synthetic Sequence
  source 1..20: mol_type = other DNA
cctcataaaatgagttaggg

SEQ ID NO: 217 - DNA, 20 bp, synthetic construct
  misc_feature 1..20: note = Synthetic Sequence
  source 1..20: mol_type = other DNA
tgcttgaacccaggaggcag

SEQ ID NO: 218 - DNA, 20 bp, synthetic construct
  misc_feature 1..20: note = Synthetic Sequence
  source 1..20: mol_type = other DNA
gcaggagaatggtgtgaacc

SEQ ID NO: 219 - DNA, 20 bp, synthetic construct
  misc_feature 1..20: note = Synthetic Sequence
  source 1..20: mol_type = other DNA
cacttgaacctgggaggcag

SEQ ID NO: 220 - DNA, 20 bp, synthetic construct
  misc_feature 1..20: note = Synthetic Sequence
  source 1..20: mol_type = other DNA
gatggtagtttgtatttctg

SEQ ID NO: 221 - DNA, 20 bp, synthetic construct
  misc_feature 1..20: note = Synthetic Sequence
  source 1..20: mol_type = other DNA
tttgaaaactggcacaagac

SEQ ID NO: 222 - DNA, 20 bp, synthetic construct
  misc_feature 1..20: note = Synthetic Sequence
  source 1..20: mol_type = other DNA
atggtagtttgtatttctgt

SEQ ID NO: 223 - DNA, 20 bp, synthetic construct
  misc_feature 1..20: note = Synthetic Sequence
  source 1..20: mol_type = other DNA
tttcactatgttggccaggc

SEQ ID NO: 224 - DNA, 20 bp, synthetic construct
  misc_feature 1..20: note = Synthetic Sequence
  source 1..20: mol_type = other DNA
tgcttgaacctgggaggcag

SEQ ID NO: 225 - DNA, 20 bp, synthetic construct
  misc_feature 1..20: note = Synthetic Sequence
  source 1..20: mol_type = other DNA
agcatgatttataatccttt

SEQ ID NO: 226 - DNA, 20 bp, synthetic construct
  misc_feature 1..20: note = Synthetic Sequence
  source 1..20: mol_type = other DNA
cactgcaagctccacctccc

SEQ ID NO: 227 - DNA, 20 bp, synthetic construct
  misc_feature 1..20: note = Synthetic Sequence
  source 1..20: mol_type = other DNA
caacctactcatctgacaaa

SEQ ID NO: 228 - DNA, 20 bp, synthetic construct
  misc_feature 1..20: note = Synthetic Sequence
  source 1..20: mol_type = other DNA
tgaacaggcaacctacagaa

SEQ ID NO: 229 - DNA, 20 bp, synthetic construct
  misc_feature 1..20: note = Synthetic Sequence
  source 1..20: mol_type = other DNA
gaacaggcaacctacagaat

SEQ ID NO: 230 - DNA, 20 bp, synthetic construct
  misc_feature 1..20: note = Synthetic Sequence
  source 1..20: mol_type = other DNA
cacctatgagtgagaacatg

SEQ ID NO: 231 - DNA, 20 bp, synthetic construct
  misc_feature 1..20: note = Synthetic Sequence
  source 1..20: mol_type = other DNA
tacaaaaaattagccaggcg

SEQ ID NO: 232 - DNA, 20 bp, synthetic construct
  misc_feature 1..20: note = Synthetic Sequence
  source 1..20: mol_type = other DNA
cttcatccatgtccctacaa

SEQ ID NO: 233 - DNA, 20 bp, synthetic construct
  misc_feature 1..20: note = Synthetic Sequence
  source 1..20: mol_type = other DNA
atacaaaaattagccgggca

SEQ ID NO: 234 - DNA, 20 bp, synthetic construct
  misc_feature 1..20: note = Synthetic Sequence
  source 1..20: mol_type = other DNA
aaccattgtggaagacagtg

SEQ ID NO: 235 - DNA, 20 bp, synthetic construct
  misc_feature 1..20: note = Synthetic Sequence
  source 1..20: mol_type = other DNA
ttgattggaatagtttcaga

SEQ ID NO: 236 - DNA, 20 bp, synthetic construct
  misc_feature 1..20: note = Synthetic Sequence
  source 1..20: mol_type = other DNA
tgtagggacatggatgaagc

SEQ ID NO: 237 - DNA, 20 bp, synthetic construct
  misc_feature 1..20: note = Synthetic Sequence
  source 1..20: mol_type = other DNA
caaaaattagccgggcatgg

SEQ ID NO: 238 - DNA, 20 bp, synthetic construct
  misc_feature 1..20: note = Synthetic Sequence
  source 1..20: mol_type = other DNA
tatctcaatagatgcagaaa

SEQ ID NO: 239 - DNA, 20 bp, synthetic construct
  misc_feature 1..20: note = Synthetic Sequence
  source 1..20: mol_type = other DNA
tgggcagatcacctgaggtc

SEQ ID NO: 240 - DNA, 20 bp, synthetic construct
  misc_feature 1..20: note = Synthetic Sequence
  source 1..20: mol_type = other DNA
aattagctgggcatggtggc

SEQ ID NO: 241 - DNA, 20 bp, synthetic construct
  misc_feature 1..20: note = Synthetic Sequence
  source 1..20: mol_type = other DNA
caggcagatcacctgaggtc

SEQ ID NO: 242 - DNA, 20 bp, synthetic construct
  misc_feature 1..20: note = Synthetic Sequence
  source 1..20: mol_type = other DNA
aattagccaggcatggtggc

SEQ ID NO: 243 - DNA, 20 bp, synthetic construct
  misc_feature 1..20: note = Synthetic Sequence
  source 1..20: mol_type = other DNA
gggtattcaattaggaaaag

SEQ ID NO: 244 - DNA, 20 bp, synthetic construct
  misc_feature 1..20: note = Synthetic Sequence
  source 1..20: mol_type = other DNA
gagatggggtttctccatgt

SEQ ID NO: 245 - DNA, 20 bp, synthetic construct
  misc_feature 1..20: note = Synthetic Sequence
  source 1..20: mol_type = other DNA
cttatccaccatgatcaagt

SEQ ID NO: 246 - DNA, 20 bp, synthetic construct
  misc_feature 1..20: note = Synthetic Sequence
  source 1..20: mol_type = other DNA
tttcaccatgttgcccaggc

SEQ ID NO: 247 - DNA, 20 bp, synthetic construct
  misc_feature 1..20: note = Synthetic Sequence
  source 1..20: mol_type = other DNA
ttccaatcaatagaaaaaga

SEQ ID NO: 248 - DNA, 20 bp, synthetic construct
  misc_feature 1..20: note = Synthetic Sequence
  source 1..20: mol_type = other DNA
gagacggggtttctccatgt

SEQ ID NO: 249 - DNA, 20 bp, synthetic construct
  misc_feature 1..20: note = Synthetic Sequence
  source 1..20: mol_type = other DNA
atcaagtgggcttcatccct

SEQ ID NO: 250 - DNA, 20 bp, synthetic construct
  misc_feature 1..20: note = Synthetic Sequence
  source 1..20: mol_type = other DNA
cccagctactggggaggctg

SEQ ID NO: 251 - DNA, 20 bp, synthetic construct
  misc_feature 1..20: note = Synthetic Sequence
  source 1..20: mol_type = other DNA
cgcttgaacccaggaggcgg

SEQ ID NO: 252 - DNA, 20 bp, synthetic construct
  misc_feature 1..20: note = Synthetic Sequence
  source 1..20: mol_type = other DNA
gatcaagtgggcttcatccc

SEQ ID NO: 253 - DNA, 20 bp, synthetic construct
  misc_feature 1..20: note = Synthetic Sequence
  source 1..20: mol_type = other DNA
cagcatgatttatagtcctt

SEQ ID NO: 254 - DNA, 20 bp, synthetic construct
  misc_feature 1..20: note = Synthetic Sequence
  source 1..20: mol_type = other DNA
agcatgatttatagtccttt

SEQ ID NO: 255 - DNA, 20 bp, synthetic construct
  misc_feature 1..20: note = Synthetic Sequence
  source 1..20: mol_type = other DNA
attccaatcaatagaaaaag

SEQ ID NO: 256 - DNA, 20 bp, synthetic construct
  misc_feature 1..20: note = Synthetic Sequence
  source 1..20: mol_type = other DNA
cgcttgaacccgggaggcag

SEQ ID NO: 257 - DNA, 20 bp, synthetic construct
  misc_feature 1..20: note = Synthetic Sequence
  source 1..20: mol_type = other DNA
aattagccgggcatggtggc

SEQ ID NO: 258 - DNA, 20 bp, synthetic construct
  misc_feature 1..20: note = Synthetic Sequence
  source 1..20: mol_type = other DNA
tacaaaaaattagctgggcg

SEQ ID NO: 259 - DNA, 20 bp, synthetic construct
  misc_feature 1..20: note = Synthetic Sequence
  source 1..20: mol_type = other DNA
ggtacatgtgcacaacgtgc

SEQ ID NO: 260 - DNA, 20 bp, synthetic construct
  misc_feature 1..20: note = Synthetic Sequence
  source 1..20: mol_type = other DNA
cgcttgaacctgggaggcgg

SEQ ID NO: 261 - DNA, 20 bp, synthetic construct
  misc_feature 1..20: note = Synthetic Sequence
  source 1..20: mol_type = other DNA
tgaagcccacttgatcatgg

SEQ ID NO: 262 - DNA, 20 bp, synthetic construct
  misc_feature 1..20: note = Synthetic Sequence
  source 1..20: mol_type = other DNA
ggatgaagcccacttgatca

SEQ ID NO: 263 - DNA, 20 bp, synthetic construct
  misc_feature 1..20: note = Synthetic Sequence
  source 1..20: mol_type = other DNA
cagcatgatttataatcctt

SEQ ID NO: 264 - DNA, 20 bp, synthetic construct
  misc_feature 1..20: note = Synthetic Sequence
  source 1..20: mol_type = other DNA
ctaaaaactctcaataaatt

SEQ ID NO: 265 - DNA, 20 bp, synthetic construct
  misc_feature 1..20: note = Synthetic Sequence
  source 1..20: mol_type = other DNA
gcttatccaccatgatcaag

SEQ ID NO: 266 - DNA, 20 bp, synthetic construct
  misc_feature 1..20: note = Synthetic Sequence
  source 1..20: mol_type = other DNA
ctcaataaattaggtattga

SEQ ID NO: 267 - DNA, 20 bp, synthetic construct
  misc_feature 1..20: note = Synthetic Sequence
  source 1..20: mol_type = other DNA
gcctcagcctccccagtagc

SEQ ID NO: 268 - DNA, 20 bp, synthetic construct
  misc_feature 1..20: note = Synthetic Sequence
  source 1..20: mol_type = other DNA
cccagtagtcattcaggagc

SEQ ID NO: 269 - DNA, 20 bp, synthetic construct
  misc_feature 1..20: note = Synthetic Sequence
  source 1..20: mol_type = other DNA
taaaagaggatacaaacaaa

SEQ ID NO: 270 - DNA, 20 bp, synthetic construct
  misc_feature 1..20: note = Synthetic Sequence
  source 1..20: mol_type = other DNA
gctgtgaatccatctggtcc

SEQ ID NO: 271 - DNA, 20 bp, synthetic construct
  misc_feature 1..20: note = Synthetic Sequence
  source 1..20: mol_type = other DNA
atactatgcagccataaaaa

SEQ ID NO: 272 - DNA, 20 bp, synthetic construct
  misc_feature 1..20: note = Synthetic Sequence
  source 1..20: mol_type = other DNA
cgcttgaacccgggaggcgg

SEQ ID NO: 273 - DNA, 20 bp, synthetic construct
  misc_feature 1..20: note = Synthetic Sequence
  source 1..20: mol_type = other DNA
ccccatcaaaaagtgggcaa

SEQ ID NO: 274 - DNA, 20 bp, synthetic construct
  misc_feature 1..20: note = Synthetic Sequence
  source 1..20: mol_type = other DNA
gagtgagaacatgcggtgtt

SEQ ID NO: 275 - DNA, 20 bp, synthetic construct
  misc_feature 1..20: note = Synthetic Sequence
  source 1..20: mol_type = other DNA
gcatattctcactcataggt

SEQ ID NO: 276 - DNA, 20 bp, synthetic construct
  misc_feature 1..20: note = Synthetic Sequence
  source 1..20: mol_type = other DNA
gagaatggcatgaacccggg

SEQ ID NO: 277 - DNA, 20 bp, synthetic construct
  misc_feature 1..20: note = Synthetic Sequence
  source 1..20: mol_type = other DNA
tcctgaatacagcacactga

SEQ ID NO: 278 - DNA, 20 bp, synthetic construct
  misc_feature 1..20: note = Synthetic Sequence
  source 1..20: mol_type = other DNA
cacctatgagtgagaatatg

SEQ ID NO: 279 - DNA, 20 bp, synthetic construct
  misc_feature 1..20: note = Synthetic Sequence
  source 1..20: mol_type = other DNA
gctactctggaggctgaggc

SEQ ID NO: 280 - DNA, 20 bp, synthetic construct
  misc_feature 1..20: note = Synthetic Sequence
  source 1..20: mol_type = other DNA
aaattagccgggcatggtgg

SEQ ID NO: 281 - DNA, 20 bp, synthetic construct
  misc_feature 1..20: note = Synthetic Sequence
  source 1..20: mol_type = other DNA
gcaacctactcatctgacaa

SEQ ID NO: 282 - DNA, 20 bp, synthetic construct
  misc_feature 1..20: note = Synthetic Sequence
  source 1..20: mol_type = other DNA
gctactggggaggctgaggc

SEQ ID NO: 283 - DNA, 20 bp, synthetic construct
  misc_feature 1..20: note = Synthetic Sequence
  source 1..20: mol_type = other DNA
tgcttgaacctgggaggcgg

SEQ ID NO: 284 - DNA, 20 bp, synthetic construct
  misc_feature 1..20: note = Synthetic Sequence
  source 1..20: mol_type = other DNA
ggaaggggaacatcacactc

SEQ ID NO: 285 - DNA, 20 bp, synthetic construct
  misc_feature 1..20: note = Synthetic Sequence
  source 1..20: mol_type = other DNA
atacaaaaattagccgggcg

SEQ ID NO: 286 - DNA, 20 bp, synthetic construct
  misc_feature 1..20: note = Synthetic Sequence
  source 1..20: mol_type = other DNA
cctgaatacagcacactgat

SEQ ID NO: 287 - DNA, 20 bp, synthetic construct
  misc_feature 1..20: note = Synthetic Sequence
  source 1..20: mol_type = other DNA
aaagacacagactggcaaat

SEQ ID NO: 288 - DNA, 20 bp, synthetic construct
  misc_feature 1..20: note = Synthetic Sequence
  source 1..20: mol_type = other DNA
gccgaggcgggtggatcacg

SEQ ID NO: 289 - DNA, 20 bp, synthetic construct
  misc_feature 1..20: note = Synthetic Sequence
  source 1..20: mol_type = other DNA
acacataggctcaaaataaa

SEQ ID NO: 290 - DNA, 20 bp, synthetic construct
  misc_feature 1..20: note = Synthetic Sequence
  source 1..20: mol_type = other DNA
tcacactctggggactgttg

SEQ ID NO: 291 - DNA, 20 bp, synthetic construct
  misc_feature 1..20: note = Synthetic Sequence
  source 1..20: mol_type = other DNA
tcacatagtcccatatttct

SEQ ID NO: 292 - DNA, 20 bp, synthetic construct
  misc_feature 1..20: note = Synthetic Sequence
  source 1..20: mol_type = other DNA
cacttgaacccaggaggcgg

SEQ ID NO: 293 - DNA, 20 bp, synthetic construct
  misc_feature 1..20: note = Synthetic Sequence
  source 1..20: mol_type = other DNA
cccatcagtgtgctgtattc

SEQ ID NO: 294 - DNA, 20 bp, synthetic construct
  misc_feature 1..20: note = Synthetic Sequence
  source 1..20: mol_type = other DNA
aaaacagagatatagatcaa

SEQ ID NO: 295 - DNA, 20 bp, synthetic construct
  misc_feature 1..20: note = Synthetic Sequence
  source 1..20: mol_type = other DNA
cgcttgaacctgggaggtgg

SEQ ID NO: 296 - DNA, 20 bp, synthetic construct
  misc_feature 1..20: note = Synthetic Sequence
  source 1..20: mol_type = other DNA
cgaggcaggtggatcacctg

SEQ ID NO: 297 - DNA, 20 bp, synthetic construct
  misc_feature 1..20: note = Synthetic Sequence
  source 1..20: mol_type = other DNA
cacactctggggactgttgt

SEQ ID NO: 298 - DNA, 20 bp, synthetic construct
  misc_feature 1..20: note = Synthetic Sequence
  source 1..20: mol_type = other DNA
aaacctaggcattaccattc

SEQ ID NO: 299 - DNA, 20 bp, synthetic construct
  misc_feature 1..20: note = Synthetic Sequence
  source 1..20: mol_type = other DNA
gctactagggaggctgaggc

SEQ ID NO: 300 - DNA, 20 bp, synthetic construct
  misc_feature 1..20: note = Synthetic Sequence
  source 1..20: mol_type = other DNA
aaggggaacatcacactctg

SEQ ID NO: 301 - DNA, 20 bp, synthetic construct
  misc_feature 1..20: note = Synthetic Sequence
  source 1..20: mol_type = other DNA
cgggcagatcacctgaggtc

SEQ ID NO: 302 - DNA, 20 bp, synthetic construct
  misc_feature 1..20: note = Synthetic Sequence
  source 1..20: mol_type = other DNA
attgatctatatctctgttt

SEQ ID NO: 303 - DNA, 20 bp, synthetic construct
  misc_feature 1..20: note = Synthetic Sequence
  source 1..20: mol_type = other DNA
tgcttgaacctgggaggtgg

SEQ ID NO: 304 - DNA, 20 bp, synthetic construct
  misc_feature 1..20: note = Synthetic Sequence
  source 1..20: mol_type = other DNA
cacaacataccagaatctct

SEQ ID NO: 305 - DNA, 20 bp, synthetic construct
  misc_feature 1..20: note = Synthetic Sequence
  source 1..20: mol_type = other DNA
tgcttgaacccaggaggcgg

SEQ ID NO: 306 - DNA, 20 bp, synthetic construct
  misc_feature 1..20: note = Synthetic Sequence
  source 1..20: mol_type = other DNA
acacaacataccagaatctc

SEQ ID NO: 307 - DNA, 20 bp, synthetic construct
  misc_feature 1..20: note = Synthetic Sequence
  source 1..20: mol_type = other DNA
ggcattaccattcaggacat

SEQ ID NO: 308 - DNA, 20 bp, synthetic construct
  misc_feature 1..20: note = Synthetic Sequence
  source 1..20: mol_type = other DNA
cgcttgaacccaggaggtgg

SEQ ID NO: 309 - DNA, 20 bp, synthetic construct
  misc_feature 1..20: note = Synthetic Sequence
  source 1..20: mol_type = other DNA
catagtcccatatttcttgg

SEQ ID NO: 310 - DNA, 20 bp, synthetic construct
  misc_feature 1..20: note = Synthetic Sequence
  source 1..20: mol_type = other DNA
ggcaggtggatcacgaggtc

SEQ ID NO: 311 - DNA, 20 bp, synthetic construct
  misc_feature 1..20: note = Synthetic Sequence
  source 1..20: mol_type = other DNA
ctcaggtgatctgcctgcct

SEQ ID NO: 312 - DNA, 20 bp, synthetic construct
  misc_feature 1..20: note = Synthetic Sequence
  source 1..20: mol_type = other DNA
tcaagagatcgagaccatcc

SEQ ID NO: 313 - DNA, 20 bp, synthetic construct
  misc_feature 1..20: note = Synthetic Sequence
  source 1..20: mol_type = other DNA
ctcaggtgatctgcccacct

SEQ ID NO: 314 - DNA, 20 bp, synthetic construct
  misc_feature 1..20: note = Synthetic Sequence
  source 1..20: mol_type = other DNA
cacttgaacccgggaggcag

SEQ ID NO: 315 - DNA, 20 bp, synthetic construct
  misc_feature 1..20: note = Synthetic Sequence
  source 1..20: mol_type = other DNA
gaaaaacaagcaatggggaa

SEQ ID NO: 316 - DNA, 20 bp, synthetic construct
  misc_feature 1..20: note = Synthetic Sequence
  source 1..20: mol_type = other DNA
aacctgagaaaaacaagcaa

SEQ ID NO: 317 - DNA, 20 bp, synthetic construct
  misc_feature 1..20: note = Synthetic Sequence
  source 1..20: mol_type = other DNA
cacttgaacctgggaggtgg

SEQ ID NO: 318 - DNA, 20 bp, synthetic construct
  misc_feature 1..20: note = Synthetic Sequence
  source 1..20: mol_type = other DNA
acctgagaaaaacaagcaat

SEQ ID NO: 319 - DNA, 20 bp, synthetic construct
  misc_feature 1..20: note = Synthetic Sequence
  source 1..20: mol_type = other DNA
ctcaagtgatccacctgcct

SEQ ID NO: 320 - DNA, 20 bp, synthetic construct
  misc_feature 1..20: note = Synthetic Sequence
  source 1..20: mol_type = other DNA
tgcttgaacccgggaggcag

SEQ ID NO: 321 - DNA, 20 bp, synthetic construct
  misc_feature 1..20: note = Synthetic Sequence
  source 1..20: mol_type = other DNA
cctgagaaaaacaagcaatg

SEQ ID NO: 322 - DNA, 20 bp, synthetic construct
  misc_feature 1..20: note = Synthetic Sequence
  source 1..20: mol_type = other DNA
cacttgaacctgggaggcgg

SEQ ID NO: 323 - DNA, 20 bp, synthetic construct
  misc_feature 1..20: note = Synthetic Sequence
  source 1..20: mol_type = other DNA
gagtgagaatatgcggtgtt

SEQ ID NO: 324 - DNA, 20 bp, synthetic construct
  misc_feature 1..20: note = Synthetic Sequence
  source 1..20: mol_type = other DNA
attctaccagaggtacaagg

SEQ ID NO: 325 - DNA, 20 bp, synthetic construct
  misc_feature 1..20: note = Synthetic Sequence
  source 1..20: mol_type = other DNA
cgcatattctcactcatagg

SEQ ID NO: 326 - DNA, 20 bp, synthetic construct
  misc_feature 1..20: note = Synthetic Sequence
  source 1..20: mol_type = other DNA
caccgcatattctcactcat

SEQ ID NO: 327 - DNA, 20 bp, synthetic construct
  misc_feature 1..20: note = Synthetic Sequence
  source 1..20: mol_type = other DNA
cacttgaacccaggaggtgg

SEQ ID NO: 328 - DNA, 20 bp, synthetic construct
  misc_feature 1..20: note = Synthetic Sequence
  source 1..20: mol_type = other DNA
tatgtacccagtagtcattc

SEQ ID NO: 329 - DNA, 20 bp, synthetic construct
  misc_feature 1..20: note = Synthetic Sequence
  source 1..20: mol_type = other DNA
gagacagggtttctccatgt

SEQ ID NO: 330 - DNA, 20 bp, synthetic construct
  misc_feature 1..20: note = Synthetic Sequence
  source 1..20: mol_type = other DNA
tgcttgaacccaggaggtgg

SEQ ID NO: 331 - DNA, 20 bp, synthetic construct
  misc_feature 1..20: note = Synthetic Sequence
  source 1..20: mol_type = other DNA
ggcaggcggatcacgaggtc

SEQ ID NO: 332 - DNA, 20 bp, synthetic construct
  misc_feature 1..20: note = Synthetic Sequence
  source 1..20: mol_type = other DNA
aggaaaactaacaaacagaa

SEQ ID NO: 333 - DNA, 20 bp, synthetic construct
  misc_feature 1..20: note = Synthetic Sequence
  source 1..20: mol_type = other DNA
atcagatagttgtagatatg

SEQ ID NO: 334 - DNA, 20 bp, synthetic construct
  misc_feature 1..20: note = Synthetic Sequence
  source 1..20: mol_type = other DNA
tacaaaaaattagccgggca

SEQ ID NO: 335 - DNA, 20 bp, synthetic construct
  misc_feature 1..20: note = Synthetic Sequence
  source 1..20: mol_type = other DNA
ggggactgttgtggggtggg

SEQ ID NO: 336 - DNA, 20 bp, synthetic construct
  misc_feature 1..20: note = Synthetic Sequence
  source 1..20: mol_type = other DNA
ttcaagatgagatttgggtg

SEQ ID NO: 337 - DNA, 20 bp, synthetic construct
  misc_feature 1..20: note = Synthetic Sequence
  source 1..20: mol_type = other DNA
atacaaaaattagccgggtg

SEQ ID NO: 338 - DNA, 20 bp, synthetic construct
  misc_feature 1..20: note = Synthetic Sequence
  source 1..20: mol_type = other DNA
ctggggactgttgtggggtg

SEQ ID NO: 339 - DNA, 20 bp, synthetic construct
  misc_feature 1..20: note = Synthetic Sequence
  source 1..20: mol_type = other DNA
caaaaattagccgggtgtgg

SEQ ID NO: 340 - DNA, 20 bp, synthetic construct
  misc_feature 1..20: note = Synthetic Sequence
  source 1..20: mol_type = other DNA
ctcaagtgatccacccacct

SEQ ID NO: 341 - DNA, 20 bp, synthetic construct
  misc_feature 1..20: note = Synthetic Sequence
  source 1..20: mol_type = other DNA
gaacaggcaacctacaaaat

SEQ ID NO: 342 - DNA, 20 bp, synthetic construct
  misc_feature 1..20: note = Synthetic Sequence
  source 1..20: mol_type = other DNA
tgaacaggcaacctacaaaa

SEQ ID NO: 343 - DNA, 20 bp, synthetic construct
  misc_feature 1..20: note = Synthetic Sequence
  source 1..20: mol_type = other DNA
tcacagccgaattctaccag

SEQ ID NO: 344 - DNA, 20 bp, synthetic construct
  misc_feature 1..20: note = Synthetic Sequence
  source 1..20: mol_type = other DNA
cttcatccatgtccctgcaa

SEQ ID NO: 345 - DNA, 20 bp, synthetic construct
  misc_feature 1..20: note = Synthetic Sequence
  source 1..20: mol_type = other DNA
cgcatgttctcactcatagg

SEQ ID NO: 346 - DNA, 20 bp, synthetic construct
  misc_feature 1..20: note = Synthetic Sequence
  source 1..20: mol_type = other DNA
tagactggataaagaaaatg

SEQ ID NO: 347 - DNA, 20 bp, synthetic construct
  misc_feature 1..20: note = Synthetic Sequence
  source 1..20: mol_type = other DNA
gagaatggtgtgaacccggg

SEQ ID NO: 348 - DNA, 20 bp, synthetic construct
  misc_feature 1..20: note = Synthetic Sequence
  source 1..20: mol_type = other DNA
tggggactgttgtggggtgg

SEQ ID NO: 349 - DNA, 20 bp, synthetic construct
  misc_feature 1..20: note = Synthetic Sequence
  source 1..20: mol_type = other DNA
caaggcaggtggatcacctg

SEQ ID NO: 350 - DNA, 20 bp, synthetic construct
  misc_feature 1..20: note = Synthetic Sequence
  source 1..20: mol_type = other DNA
ggtacatgtgcacattgtgc

SEQ ID NO: 351 - DNA, 20 bp, synthetic construct
  misc_feature 1..20: note = Synthetic Sequence
  source 1..20: mol_type = other DNA
tccaattaaaagacacagac

SEQ ID NO: 352 - DNA, 20 bp, synthetic construct
  misc_feature 1..20: note = Synthetic Sequence
  source 1..20: mol_type = other DNA
caccgcatgttctcactcat

SEQ ID NO: 353 - DNA, 20 bp, synthetic construct
  misc_feature 1..20: note = Synthetic Sequence
  source 1..20: mol_type = other DNA
acctcatgatccacccgcct

SEQ ID NO: 354 - DNA, 20 bp, synthetic construct
  misc_feature 1..20: note = Synthetic Sequence
  source 1..20: mol_type = other DNA
attcaagatgagatttgggt

SEQ ID NO: 355 - DNA, 20 bp, synthetic construct
  misc_feature 1..20: note = Synthetic Sequence
  source 1..20: mol_type = other DNA
tgaggcaggtggatcacctg

SEQ ID NO: 356 - DNA, 20 bp, synthetic construct
  misc_feature 1..20: note = Synthetic Sequence
  source 1..20: mol_type = other DNA
aattcaagatgagatttggg

SEQ ID NO: 357 - DNA, 20 bp, synthetic construct
  misc_feature 1..20: note = Synthetic Sequence
  source 1..20: mol_type = other DNA
ttaatgatcgccattctaac

SEQ ID NO: 358 - DNA, 20 bp, synthetic construct
  misc_feature 1..20: note = Synthetic Sequence
  source 1..20: mol_type = other DNA
aattagccaggtgtggtggc

SEQ ID NO: 359 - DNA, 20 bp, synthetic construct
  misc_feature 1..20: note = Synthetic Sequence
  source 1..20: mol_type = other DNA
atggcgatcattaaaaagtc

SEQ ID NO: 360 - DNA, 20 bp, synthetic construct
  misc_feature 1..20: note = Synthetic Sequence
  source 1..20: mol_type = other DNA
cattcaaagcagtgtgtaga

SEQ ID NO: 361 - DNA, 20 bp, synthetic construct
  misc_feature 1..20: note = Synthetic Sequence
  source 1..20: mol_type = other DNA
cttgtacctctggtagaatt

SEQ ID NO: 362 - DNA, 20 bp, synthetic construct
  misc_feature 1..20: note = Synthetic Sequence
  source 1..20: mol_type = other DNA
tttcatcatgttggccaggc

SEQ ID NO: 363 - DNA, 20 bp, synthetic construct
  misc_feature 1..20: note = Synthetic Sequence
  source 1..20: mol_type = other DNA
ggaaggggaacatcacacac

SEQ ID NO: 364 - DNA, 20 bp, synthetic construct
  misc_feature 1..20: note = Synthetic Sequence
  source 1..20: mol_type = other DNA
ctcaggtgatctgcccgcct

SEQ ID NO: 365 - DNA, 20 bp, synthetic construct
  misc_feature 1..20: note = Synthetic Sequence
  source 1..20: mol_type = other DNA
aatggcatgaacccgggagg

SEQ ID NO: 366 - DNA, 20 bp, synthetic construct
  misc_feature 1..20: note = Synthetic Sequence
  source 1..20: mol_type = other DNA
tacccagtaatgggattgct

SEQ ID NO: 367 - DNA, 20 bp, synthetic construct
  misc_feature 1..20: note = Synthetic Sequence
  source 1..20: mol_type = other DNA
gggcagccagagagaaaggt

SEQ ID NO: 368 - DNA, 20 bp, synthetic construct
  misc_feature 1..20: note = Synthetic Sequence
  source 1..20: mol_type = other DNA
atacccagtaatgggattgc

SEQ ID NO: 369 - DNA, 20 bp, synthetic construct
  misc_feature 1..20: note = Synthetic Sequence
  source 1..20: mol_type = other DNA
ttctttattagtcttgctag

SEQ ID NO: 370 - DNA, 20 bp, synthetic construct
  misc_feature 1..20: note = Synthetic Sequence
  source 1..20: mol_type = other DNA
tgcttgaacccgggaggcgg

SEQ ID NO: 371 - DNA, 20 bp, synthetic construct
  misc_feature 1..20: note = Synthetic Sequence
  source 1..20: mol_type = other DNA
tacaattcaagatgagattt

SEQ ID NO: 372 - DNA, 20 bp, synthetic construct
  misc_feature 1..20: note = Synthetic Sequence
  source 1..20: mol_type = other DNA
tccaacagacctgcagctga

SEQ ID NO: 373 - DNA, 20 bp, synthetic construct
  misc_feature 1..20: note = Synthetic Sequence
  source 1..20: mol_type = other DNA
ctcaggtgatccgcccacct

SEQ ID NO: 374 - DNA, 20 bp, synthetic construct
  misc_feature 1..20: note = Synthetic Sequence
  source 1..20: mol_type = other DNA
agcactttgggaggccgaga

SEQ ID NO: 375 - DNA, 20 bp, synthetic construct
  misc_feature 1..20: note = Synthetic Sequence
  source 1..20: mol_type = other DNA
ccccatcaaaaagtgggcga

SEQ ID NO: 376 - DNA, 20 bp, synthetic construct
  misc_feature 1..20: note = Synthetic Sequence
  source 1..20: mol_type = other DNA
cgcttgaacccgggaggtgg

SEQ ID NO: 377 - DNA, 20 bp, synthetic construct
  misc_feature 1..20: note = Synthetic Sequence
  source 1..20: mol_type = other DNA
cccgccactgcactccagcc

SEQ ID NO: 378 - DNA, 20 bp, synthetic construct
  misc_feature 1..20: note = Synthetic Sequence
  source 1..20: mol_type = other DNA
caggcagatcacttgaggtc

SEQ ID NO: 379 - DNA, 20 bp, synthetic construct
  misc_feature 1..20: note = Synthetic Sequence
  source 1..20: mol_type = other DNA
ccgccactgcactccagcct

SEQ ID NO: 380 - DNA, 20 bp, synthetic construct
  misc_feature 1..20: note = Synthetic Sequence
  source 1..20: mol_type = other DNA
ctcaggtgatccgcctgcct

SEQ ID NO: 381 - DNA, 20 bp, synthetic construct
  misc_feature 1..20: note = Synthetic Sequence
  source 1..20: mol_type = other DNA
atgagttcatgtcctttgca

SEQ ID NO: 382 - DNA, 20 bp, synthetic construct
  misc_feature 1..20: note = Synthetic Sequence
  source 1..20: mol_type = other DNA
aatgctaaatgacgagttaa

SEQ ID NO: 383 - DNA, 20 bp, synthetic construct
  misc_feature 1..20: note = Synthetic Sequence
  source 1..20: mol_type = other DNA
aatgagaacacatggacaca

SEQ ID NO: 384 - DNA, 20 bp, synthetic construct
  misc_feature 1..20: note = Synthetic Sequence
  source 1..20: mol_type = other DNA
atgctaaatgacgagttaat

SEQ ID NO: 385 - DNA, 20 bp, synthetic construct
  misc_feature 1..20: note = Synthetic Sequence
  source 1..20: mol_type = other DNA
gctactcaggaggctgagac

SEQ ID NO: 386 - DNA, 20 bp, synthetic construct
  misc_feature 1..20: note = Synthetic Sequence
  source 1..20: mol_type = other DNA
caatgagaacacttggacac

SEQ ID NO: 387 - DNA, 20 bp, synthetic construct
  misc_feature 1..20: note = Synthetic Sequence
  source 1..20: mol_type = other DNA
caagaccatcctggccaaca

SEQ ID NO: 388 - DNA, 20 bp, synthetic construct
  misc_feature 1..20: note = Synthetic Sequence
  source 1..20: mol_type = other DNA
gagatggggtttcaccatat

SEQ ID NO: 389 - DNA, 20 bp, synthetic construct
  misc_feature 1..20: note = Synthetic Sequence
  source 1..20: mol_type = other DNA
tcaggagatggagaccatcc

SEQ ID NO: 390 - DNA, 20 bp, synthetic construct
  misc_feature 1..20: note = Synthetic Sequence
  source 1..20: mol_type = other DNA
cacttgaacccgggaggcgg

SEQ ID NO: 391 - DNA, 20 bp, synthetic construct
  misc_feature 1..20: note = Synthetic Sequence
  source 1..20: mol_type = other DNA
atacaaaaatcaattcaaga

SEQ ID NO: 392 - DNA, 20 bp, synthetic construct
  misc_feature 1..20: note = Synthetic Sequence
  source 1..20: mol_type = other DNA
ttaactcgtcatttagcatt

SEQ ID NO: 393 - DNA, 20 bp, synthetic construct
  misc_feature 1..20: note = Synthetic Sequence
  source 1..20: mol_type = other DNA
gagtgagaacatgtggtgtt

SEQ ID NO: 394 - DNA, 20 bp, synthetic construct
  misc_feature 1..20: note = Synthetic Sequence
  source 1..20: mol_type = other DNA
aatgctagatgacgagttag

SEQ ID NO: 395 - DNA, 20 bp, synthetic construct
  misc_feature 1..20: note = Synthetic Sequence
  source 1..20: mol_type = other DNA
cgagaccagcctggccaata

SEQ ID NO: 396 - DNA, 20 bp, synthetic construct
  misc_feature 1..20: note = Synthetic Sequence
  source 1..20: mol_type = other DNA
ctcaagtgatctgcctgcct

SEQ ID NO: 397 - DNA, 20 bp, synthetic construct
  misc_feature 1..20: note = Synthetic Sequence
  source 1..20: mol_type = other DNA
atgctagatgacgagttagt

SEQ ID NO: 398 - DNA, 20 bp, synthetic construct
  misc_feature 1..20: note = Synthetic Sequence
  source 1..20: mol_type = other DNA
tgggcagatcacttgaggtc

SEQ ID NO: 399 - DNA, 20 bp, synthetic construct
  misc_feature 1..20: note = Synthetic Sequence
  source 1..20: mol_type = other DNA
accctcagctgcaggtctgt

SEQ ID NO: 400 - DNA, 20 bp, synthetic construct
  misc_feature 1..20: note = Synthetic Sequence
  source 1..20: mol_type = other DNA
ctaactcgtcatctagcatt

SEQ ID NO: 401 - DNA, 20 bp, synthetic construct
  misc_feature 1..20: note = Synthetic Sequence
  source 1..20: mol_type = other DNA
tgagaccatcctggccaaca

SEQ ID NO: 402 - DNA, 20 bp, synthetic construct
  misc_feature 1..20: note = Synthetic Sequence
  source 1..20: mol_type = other DNA
cgaattctaccagaggtaca

SEQ ID NO: 403 - DNA, 20 bp, synthetic construct
  misc_feature 1..20: note = Synthetic Sequence
  source 1..20: mol_type = other DNA
gccgaggcgggtggatcatg

SEQ ID NO: 404 - DNA, 20 bp, synthetic construct
  misc_feature 1..20: note = Synthetic Sequence
  source 1..20: mol_type = other DNA
aaaacagagatatagaccaa

SEQ ID NO: 405 - DNA, 20 bp, synthetic construct
  misc_feature 1..20: note = Synthetic Sequence
  source 1..20: mol_type = other DNA
tttcaccatgttgaccaggc

SEQ ID NO: 406 - DNA, 20 bp, synthetic construct
  misc_feature 1..20: note = Synthetic Sequence
  source 1..20: mol_type = other DNA
gagatggggtttcgccatgt

SEQ ID NO: 407 - DNA, 20 bp, synthetic construct
  misc_feature 1..20: note = Synthetic Sequence
  source 1..20: mol_type = other DNA
gccgaggcgggcagatcacg

SEQ ID NO: 408 - DNA, 20 bp, synthetic construct
  misc_feature 1..20: note = Synthetic Sequence
  source 1..20: mol_type = other DNA
atcagatggttgtagatgtg

SEQ ID NO: 409 - DNA, 20 bp, synthetic construct
  misc_feature 1..20: note = Synthetic Sequence
  source 1..20: mol_type = other DNA
tttcaccttgttagccagga

SEQ ID NO: 410 - DNA, 20 bp, synthetic construct
  misc_feature 1..20: note = Synthetic Sequence
  source 1..20: mol_type = other DNA
gagaatggcatgaacccagg

SEQ ID NO: 411 - DNA, 20 bp, synthetic construct
  misc_feature 1..20: note = Synthetic Sequence
  source 1..20: mol_type = other DNA
taagatcagagcagaactga

SEQ ID NO: 412 - DNA, 20 bp, synthetic construct
  misc_feature 1..20: note = Synthetic Sequence
  source 1..20: mol_type = other DNA
ctcaggtgatccgcccgcct

SEQ ID NO: 413 - DNA, 20 bp, synthetic construct
  misc_feature 1..20: note = Synthetic Sequence
  source 1..20: mol_type = other DNA
caggagaatggcatgaacct

SEQ ID NO: 414 - DNA, 20 bp, synthetic construct
  misc_feature 1..20: note = Synthetic Sequence
  source 1..20: mol_type = other DNA
ctcaagtgatctgcccacct

SEQ ID NO: 415 - DNA, 20 bp, synthetic construct
  misc_feature 1..20: note = Synthetic Sequence
  source 1..20: mol_type = other DNA
aacattccatgctcatggat

SEQ ID NO: 416 - DNA, 20 bp, synthetic construct
  misc_feature 1..20: note = Synthetic Sequence
  source 1..20: mol_type = other DNA
tgcttgaacccgggaggtgg

SEQ ID NO: 417 - DNA, 20 bp, synthetic construct
  misc_feature 1..20: note = Synthetic Sequence
  source 1..20: mol_type = other DNA
aattagccgggcgtggtggt

SEQ ID NO: 418 - DNA, 20 bp, synthetic construct
  misc_feature 1..20: note = Synthetic Sequence
  source 1..20: mol_type = other DNA
gagaatggcatgaacctggg

SEQ ID NO: 419 - DNA, 20 bp, synthetic construct
  misc_feature 1..20: note = Synthetic Sequence
  source 1..20: mol_type = other DNA
aacaaagcctccaagaaata

SEQ ID NO: 420 - DNA, 20 bp, synthetic construct
  misc_feature 1..20: note = Synthetic Sequence
  source 1..20: mol_type = other DNA
aaaaaattagccgggcgtag

SEQ ID NO: 421 - DNA, 20 bp, synthetic construct
  misc_feature 1..20: note = Synthetic Sequence
  source 1..20: mol_type = other DNA
aattagccaggcgtggtggt

SEQ ID NO: 422 - DNA, 20 bp, synthetic construct
  misc_feature 1..20: note = Synthetic Sequence
  source 1..20: mol_type = other DNA
aaaaagagtccaggaccaga

SEQ ID NO: 423 - DNA, 20 bp, synthetic construct
  misc_feature 1..20: note = Synthetic Sequence
  source 1..20: mol_type = other DNA
aattgaacaatgagaacact

SEQ ID NO: 424 - DNA, 20 bp, synthetic construct
  misc_feature 1..20: note = Synthetic Sequence
  source 1..20: mol_type = other DNA
acaaagcctccaagaaatat

SEQ ID NO: 425 - DNA, 20 bp, synthetic construct
  misc_feature 1..20: note = Synthetic Sequence
  source 1..20: mol_type = other DNA
gctacttgggaggctgagac

SEQ ID NO: 426 - DNA, 20 bp, synthetic construct
  misc_feature 1..20: note = Synthetic Sequence
  source 1..20: mol_type = other DNA
aattagccgggcgtagtggc

SEQ ID NO: 427 - DNA, 20 bp, synthetic construct
  misc_feature 1..20: note = Synthetic Sequence
  source 1..20: mol_type = other DNA
aaattagccgggcgtagtgg

SEQ ID NO: 428 - DNA, 20 bp, synthetic construct
  misc_feature 1..20: note = Synthetic Sequence
  source 1..20: mol_type = other DNA
atattaaccttaaatgtaaa

SEQ ID NO: 429 - DNA, 20 bp, synthetic construct
  misc_feature 1..20: note = Synthetic Sequence
  source 1..20: mol_type = other DNA
ctgggtacataacgaaatga

SEQ ID NO: 430 - DNA, 20 bp, synthetic construct
  misc_feature 1..20: note = Synthetic Sequence
  source 1..20: mol_type = other DNA
tacaaaaaattagccgggtg

SEQ ID NO: 431 - DNA, 20 bp, synthetic construct
  misc_feature 1..20: note = Synthetic Sequence
  source 1..20: mol_type = other DNA
agttgaacaatgagaacaca

SEQ ID NO: 432 - DNA, 20 bp, synthetic construct
  misc_feature 1..20: note = Synthetic Sequence
  source 1..20: mol_type = other DNA
tgttagtttgctgagaatga

SEQ ID NO: 433 - DNA, 20 bp, synthetic construct
  misc_feature 1..20: note = Synthetic Sequence
  source 1..20: mol_type = other DNA
tttcaccacgttggccaggc

SEQ ID NO: 434 - DNA, 20 bp, synthetic construct
  misc_feature 1..20: note = Synthetic Sequence
  source 1..20: mol_type = other DNA
atttagcccatttacattta

SEQ ID NO: 435 - DNA, 20 bp, synthetic construct
  misc_feature 1..20: note = Synthetic Sequence
  source 1..20: mol_type = other DNA
tttatccagtctatcattga

SEQ ID NO: 436 - DNA, 20 bp, synthetic construct
  misc_feature 1..20: note = Synthetic Sequence
  source 1..20: mol_type = other DNA
gccgaggtgggcggatcacg

SEQ ID NO: 437 - DNA, 20 bp, synthetic construct
  misc_feature 1..20: note = Synthetic Sequence
  source 1..20: mol_type = other DNA
ggctcaaaataaagggatgg

SEQ ID NO: 438 - DNA, 20 bp, synthetic construct
  misc_feature 1..20: note = Synthetic Sequence
  source 1..20: mol_type = other DNA
aacctgacaaaaacaagaaa

SEQ ID NO: 439 - DNA, 20 bp, synthetic construct
  misc_feature 1..20: note = Synthetic Sequence
  source 1..20: mol_type = other DNA
aattagctgggcgtggtggt

SEQ ID NO: 440 - DNA, 20 bp, synthetic construct
  misc_feature 1..20: note = Synthetic Sequence
  source 1..20: mol_type = other DNA
acctgacaaaaacaagaaat

SEQ ID NO: 441 - DNA, 20 bp, synthetic construct
  misc_feature 1..20: note = Synthetic Sequence
  source 1..20: mol_type = other DNA
cacttgaacccgggaggtgg

SEQ ID NO: 442 - DNA, 20 bp, synthetic construct
  misc_feature 1..20: note = Synthetic Sequence
  source 1..20: mol_type = other DNA
aaatacaaaaaaaattagcc

SEQ ID NO: 443 - DNA, 20 bp, synthetic construct
  misc_feature 1..20: note = Synthetic Sequence
  source 1..20: mol_type = other DNA
ccagaggtacaaggaggaac

SEQ ID NO: 444 - DNA, 20 bp, synthetic construct
  misc_feature 1..20: note = Synthetic Sequence
  source 1..20: mol_type = other DNA
gagacggggtttcaccatat

SEQ ID NO: 445 - DNA, 20 bp, synthetic construct
  misc_feature 1..20: note = Synthetic Sequence
  source 1..20: mol_type = other DNA
cctgacaaaaacaagaaatg

SEQ ID NO: 446 - DNA, 20 bp, synthetic construct
  misc_feature 1..20: note = Synthetic Sequence
  source 1..20: mol_type = other DNA
tattaaccttaaatgtaaat

SEQ ID NO: 447 - DNA, 20 bp, synthetic construct
  misc_feature 1..20: note = Synthetic Sequence
  source 1..20: mol_type = other DNA
gatgagttcatgtcctttgc

SEQ ID NO: 448 - DNA, 20 bp, synthetic construct
  misc_feature 1..20: note = Synthetic Sequence
  source 1..20: mol_type = other DNA
caggcacccgccaccacgcc

SEQ ID NO: 449 - DNA, 20 bp, synthetic construct
  misc_feature 1..20: note = Synthetic Sequence
  source 1..20: mol_type = other DNA
tttataaattacccagtctc

SEQ ID NO: 450 - DNA, 20 bp, synthetic construct
  misc_feature 1..20: note = Synthetic Sequence
  source 1..20: mol_type = other DNA
ctcaagtgatccacccgcct

SEQ ID NO: 451 - DNA, 20 bp, synthetic construct
  misc_feature 1..20: note = Synthetic Sequence
  source 1..20: mol_type = other DNA
ttattatactttaagttcta

SEQ ID NO: 452 - DNA, 20 bp, synthetic construct
  misc_feature 1..20: note = Synthetic Sequence
  source 1..20: mol_type = other DNA
cctttcaaaaaaccagctcc

SEQ ID NO: 453 - DNA, 20 bp, synthetic construct
  misc_feature 1..20: note = Synthetic Sequence
  source 1..20: mol_type = other DNA
gccgaggcaggcggatcacg

SEQ ID NO: 454 - DNA, 20 bp, synthetic construct
  misc_feature 1..20: note = Synthetic Sequence
  source 1..20: mol_type = other DNA
agtcaggaaacaacagatgc

SEQ ID NO: 455 - DNA, 20 bp, synthetic construct
  misc_feature 1..20: note = Synthetic Sequence
  source 1..20: mol_type = other DNA
aaaaaattagccgggcgcgg

SEQ ID NO: 456 - DNA, 20 bp, synthetic construct
  misc_feature 1..20: note = Synthetic Sequence
  source 1..20: mol_type = other DNA
tttcaccatgttagccaggc

SEQ ID NO: 457 - DNA, 20 bp, synthetic construct
  misc_feature 1..20: note = Synthetic Sequence
  source 1..20: mol_type = other DNA
caatctactcatctgacaaa

SEQ ID NO: 458 - DNA, 20 bp, synthetic construct
  misc_feature 1..20: note = Synthetic Sequence
  source 1..20: mol_type = other DNA
gagacggggtttcgccatgt

SEQ ID NO: 459 - DNA, 20 bp, synthetic construct
  misc_feature 1..20: note = Synthetic Sequence
  source 1..20: mol_type = other DNA
gagacagggtttcaccatat

SEQ ID NO: 460 - DNA, 20 bp, synthetic construct
  misc_feature 1..20: note = Synthetic Sequence
  source 1..20: mol_type = other DNA
gagatggggtttcactatgt

SEQ ID NO: 461 - DNA, 20 bp, synthetic construct
  misc_feature 1..20: note = Synthetic Sequence
  source 1..20: mol_type = other DNA
tttctagtttatttgcgtag

SEQ ID NO: 462 - DNA, 20 bp, synthetic construct
  misc_feature 1..20: note = Synthetic Sequence
  source 1..20: mol_type = other DNA
aattagccaggcatggtggt

SEQ ID NO: 463 - DNA, 20 bp, synthetic construct
  misc_feature 1..20: note = Synthetic Sequence
  source 1..20: mol_type = other DNA
cacacataggctcaaaataa

SEQ ID NO: 464 - DNA, 20 bp, synthetic construct
  misc_feature 1..20: note = Synthetic Sequence
  source 1..20: mol_type = other DNA
ggaaacaacagatgctggag

SEQ ID NO: 465 - DNA, 20 bp, synthetic construct
  misc_feature 1..20: note = Synthetic Sequence
  source 1..20: mol_type = other DNA
gagaatggtgtgaacccagg

SEQ ID NO: 466 - DNA, 20 bp, synthetic construct
  misc_feature 1..20: note = Synthetic Sequence
  source 1..20: mol_type = other DNA
aattagctgggcatggtggt

SEQ ID NO: 467 - DNA, 20 bp, synthetic construct
  misc_feature 1..20: note = Synthetic Sequence
  source 1..20: mol_type = other DNA
ttatccagtctatcattgat

SEQ ID NO: 468 - DNA, 20 bp, synthetic construct
  misc_feature 1..20: note = Synthetic Sequence
  source 1..20: mol_type = other DNA
gagacagggtttcgccatgt

SEQ ID NO: 469 - DNA, 20 bp, synthetic construct
  misc_feature 1..20: note = Synthetic Sequence
  source 1..20: mol_type = other DNA
tctatcattgatgggcattt

SEQ ID NO: 470 - DNA, 20 bp, synthetic construct
  misc_feature 1..20: note = Synthetic Sequence
  source 1..20: mol_type = other DNA
aattagccgggcgcggtggc

SEQ ID NO: 471 - DNA, 20 bp, synthetic construct
  misc_feature 1..20: note = Synthetic Sequence
  source 1..20: mol_type = other DNA
caaaaacaagaaatggggaa

SEQ ID NO: 472 - DNA, 20 bp, synthetic construct
  misc_feature 1..20: note = Synthetic Sequence
  source 1..20: mol_type = other DNA
gcaatctactcatctgacaa

SEQ ID NO: 473 - DNA, 20 bp, synthetic construct
  misc_feature 1..20: note = Synthetic Sequence
  source 1..20: mol_type = other DNA
aaattagccgggcgcggtgg

SEQ ID NO: 474 - DNA, 20 bp, synthetic construct
  misc_feature 1..20: note = Synthetic Sequence
  source 1..20: mol_type = other DNA
taatgtaaatgacgagttaa

SEQ ID NO: 475 - DNA, 20 bp, synthetic construct
  misc_feature 1..20: note = Synthetic Sequence
  source 1..20: mol_type = other DNA
ggctcaaaataaaaggatgg

SEQ ID NO: 476 - DNA, 20 bp, synthetic construct
  misc_feature 1..20: note = Synthetic Sequence
  source 1..20: mol_type = other DNA
gactaaaacaccaaaagcaa

SEQ ID NO: 477 - DNA, 20 bp, synthetic construct
  misc_feature 1..20: note = Synthetic Sequence
  source 1..20: mol_type = other DNA
gccgaggcaggtggatcacg

SEQ ID NO: 478 - DNA, 20 bp, synthetic construct
  misc_feature 1..20: note = Synthetic Sequence
  source 1..20: mol_type = other DNA
aacagatgctggagaggatg

SEQ ID NO: 479 - DNA, 20 bp, synthetic construct
  misc_feature 1..20: note = Synthetic Sequence
  source 1..20: mol_type = other DNA
tgaatgtgtcccagagattc

SEQ ID NO: 480 - DNA, 20 bp, synthetic construct
  misc_feature 1..20: note = Synthetic Sequence
  source 1..20: mol_type = other DNA
ctacaattcaagatgagatt

SEQ ID NO: 481 - DNA, 20 bp, synthetic construct
  misc_feature 1..20: note = Synthetic Sequence
  source 1..20: mol_type = other DNA
gccgaggtgggtggatcacg

SEQ ID NO: 482 - DNA, 20 bp, synthetic construct
  misc_feature 1..20: note = Synthetic Sequence
  source 1..20: mol_type = other DNA
gagatgaggtttcaccatgt

SEQ ID NO: 483 - DNA, 20 bp, synthetic construct
  misc_feature 1..20: note = Synthetic Sequence
  source 1..20: mol_type = other DNA
gatgatggtgatgtacagat

SEQ ID NO: 484 - DNA, 20 bp, synthetic construct
  misc_feature 1..20: note = Synthetic Sequence
  source 1..20: mol_type = other DNA
tgatgatggtgatgtacaga

SEQ ID NO: 485 - DNA, 20 bp, synthetic construct
  misc_feature 1..20: note = Synthetic Sequence
  source 1..20: mol_type = other DNA
acaaaaaaattagccgggcg

SEQ ID NO: 486 - DNA, 20 bp, synthetic construct
  misc_feature 1..20: note = Synthetic Sequence
  source 1..20: mol_type = other DNA
gggatttcaccatgttggcc

SEQ ID NO: 487 - DNA, 20 bp, synthetic construct
  misc_feature 1..20: note = Synthetic Sequence
  source 1..20: mol_type = other DNA
cgagaccatcccggctaaaa

SEQ ID NO: 488 - DNA, 20 bp, synthetic construct
  misc_feature 1..20: note = Synthetic Sequence
  source 1..20: mol_type = other DNA
cactgcaagctccgcttccc

SEQ ID NO: 489 - DNA, 20 bp, synthetic construct
  misc_feature 1..20: note = Synthetic Sequence
  source 1..20: mol_type = other DNA
caagaccagcctggccaata

SEQ ID NO: 490 - DNA, 20 bp, synthetic construct
  misc_feature 1..20: note = Synthetic Sequence
  source 1..20: mol_type = other DNA
gacagtgtggcgattcctca

SEQ ID NO: 491 - DNA, 20 bp, synthetic construct
  misc_feature 1..20: note = Synthetic Sequence
  source 1..20: mol_type = other DNA
aatgtaaatgacgagttaat

SEQ ID NO: 492 - DNA, 20 bp, synthetic construct
  misc_feature 1..20: note = Synthetic Sequence
  source 1..20: mol_type = other DNA
cgccacactgtcttccacaa

SEQ ID NO: 493 - DNA, 20 bp, synthetic construct
  misc_feature 1..20: note = Synthetic Sequence
  source 1..20: mol_type = other DNA
ggagaccatcctggctaaca

SEQ ID NO: 494 - DNA, 20 bp, synthetic construct
  misc_feature 1..20: note = Synthetic Sequence
  source 1..20: mol_type = other DNA
attaactcgtcatttacatt

SEQ ID NO: 495 - DNA, 20 bp, synthetic construct
  misc_feature 1..20: note = Synthetic Sequence
  source 1..20: mol_type = other DNA
gtctatcattgatgggcatt

SEQ ID NO: 496 - DNA, 20 bp, synthetic construct
  misc_feature 1..20: note = Synthetic Sequence
  source 1..20: mol_type = other DNA
gagacggggtttcactatgt

SEQ ID NO: 497 - DNA, 20 bp, synthetic construct
  misc_feature 1..20: note = Synthetic Sequence
  source 1..20: mol_type = other DNA
tttcaccatgttggccagac

SEQ ID NO: 498 - DNA, 20 bp, synthetic construct
  misc_feature 1..20: note = Synthetic Sequence
  source 1..20: mol_type = other DNA
gagacgaggtttcaccatgt

SEQ ID NO: 499 - DNA, 20 bp, synthetic construct
  misc_feature 1..20: note = Synthetic Sequence
  source 1..20: mol_type = other DNA
cagaagaatcgcttgaaccc

SEQ ID NO: 500 - DNA, 20 bp, synthetic construct
  misc_feature 1..20: note = Synthetic Sequence
  source 1..20: mol_type = other DNA
acattcaaagcagtgtgtag

SEQ ID NO: 501 - DNA, 20 bp, synthetic construct
  misc_feature 1..20: note = Synthetic Sequence
  source 1..20: mol_type = other DNA
cgaggcaggcagatcacctg

SEQ ID NO: 502 - DNA, 20 bp, synthetic construct
  misc_feature 1..20: note = Synthetic Sequence
  source 1..20: mol_type = other DNA
ttaggattgacttggcgatg

SEQ ID NO: 503 - DNA, 20 bp, synthetic construct
  misc_feature 1..20: note = Synthetic Sequence
  source 1..20: mol_type = other DNA
atattaactttaaatgtaaa

SEQ ID NO: 504 - DNA, 20 bp, synthetic construct
  misc_feature 1..20: note = Synthetic Sequence
  source 1..20: mol_type = other DNA
gagaacacttggacacagga

SEQ ID NO: 505 - DNA, 20 bp, synthetic construct
  misc_feature 1..20: note = Synthetic Sequence
  source 1..20: mol_type = other DNA
agaccaaatctacgtctgat

SEQ ID NO: 506 - DNA, 20 bp, synthetic construct
  misc_feature 1..20: note = Synthetic Sequence
  source 1..20: mol_type = other DNA
aatggcatgaacctgggagg

SEQ ID NO: 507 - DNA, 20 bp, synthetic construct
  misc_feature 1..20: note = Synthetic Sequence
  source 1..20: mol_type = other DNA
caggagaatctcttgaaccc

SEQ ID NO: 508 - DNA, 20 bp, synthetic construct
  misc_feature 1..20: note = Synthetic Sequence
  source 1..20: mol_type = other DNA
caggagaatggtgtgaacct

SEQ ID NO: 509 - DNA, 20 bp, synthetic construct
  misc_feature 1..20: note = Synthetic Sequence
  source 1..20: mol_type = other DNA
aatggcatgaacccaggagg

SEQ ID NO: 510 - DNA, 20 bp, synthetic construct
  misc_feature 1..20: note = Synthetic Sequence
  source 1..20: mol_type = other DNA
gagaatggtgtgaacctggg

SEQ ID NO: 511 - DNA, 20 bp, synthetic construct
  misc_feature 1..20: note = Synthetic Sequence
  source 1..20: mol_type = other DNA
cgggcagatcacttgaggtc

SEQ ID NO: 512 - DNA, 20 bp, synthetic construct
  misc_feature 1..20: note = Synthetic Sequence
  source 1..20: mol_type = other DNA
gcaggagaatctcttgaacc

SEQ ID NO: 513 - DNA, 20 bp, synthetic construct
  misc_feature 1..20: note = Synthetic Sequence
  source 1..20: mol_type = other DNA
tgagaccagcctggccaata

SEQ ID NO: 514 - DNA, 20 bp, synthetic construct
  misc_feature 1..20: note = Synthetic Sequence
  source 1..20: mol_type = other DNA
aaaacaaccccatcaaaaag

SEQ ID NO: 515 - DNA, 20 bp, synthetic construct
  misc_feature 1..20: note = Synthetic Sequence
  source 1..20: mol_type = other DNA
acaccaatcagacgtagatt

SEQ ID NO: 516 - DNA, 20 bp, synthetic construct
  misc_feature 1..20: note = Synthetic Sequence
  source 1..20: mol_type = other DNA
caggagaatggcttgaaccc

SEQ ID NO: 517 - DNA, 20 bp, synthetic construct
  misc_feature 1..20: note = Synthetic Sequence
  source 1..20: mol_type = other DNA
cctcaggaaacttacaatca

SEQ ID NO: 518 - DNA, 20 bp, synthetic construct
  misc_feature 1..20: note = Synthetic Sequence
  source 1..20: mol_type = other DNA
caatacagagaagtgcttaa

SEQ ID NO: 519 - DNA, 20 bp, synthetic construct
  misc_feature 1..20: note = Synthetic Sequence
  source 1..20: mol_type = other DNA
gctactcaggaggctgaagc

SEQ ID NO: 520 - DNA, 20 bp, synthetic construct
  misc_feature 1..20: note = Synthetic Sequence
  source 1..20: mol_type = other DNA
aaattaatgaatccaggagc

SEQ ID NO: 521 - DNA, 20 bp, synthetic construct
  misc_feature 1..20: note = Synthetic Sequence
  source 1..20: mol_type = other DNA
ttcaaaaaattaatgaatcc

SEQ ID NO: 522 - DNA, 20 bp, synthetic construct
  misc_feature 1..20: note = Synthetic Sequence
  source 1..20: mol_type = other DNA
gagacagggtttcactatgt

SEQ ID NO: 523 - DNA, 20 bp, synthetic construct
  misc_feature 1..20: note = Synthetic Sequence
  source 1..20: mol_type = other DNA
ccatgattgtaagtttcctg

SEQ ID NO: 524 - DNA, 20 bp, synthetic construct
  misc_feature 1..20: note = Synthetic Sequence
  source 1..20: mol_type = other DNA
aaggggaacatcacacaccg

SEQ ID NO: 525 - DNA, 20 bp, synthetic construct
  misc_feature 1..20: note = Synthetic Sequence
  source 1..20: mol_type = other DNA
tcaagagattgagaccatcc

SEQ ID NO: 526 - DNA, 20 bp, synthetic construct
  misc_feature 1..20: note = Synthetic Sequence
  source 1..20: mol_type = other DNA
cacttatgagtgagaacatg

SEQ ID NO: 527 - DNA, 20 bp, synthetic construct
  misc_feature 1..20: note = Synthetic Sequence
  source 1..20: mol_type = other DNA
gcaggagaatggcttgaacc

SEQ ID NO: 528 - DNA, 20 bp, synthetic construct
  misc_feature 1..20: note = Synthetic Sequence
  source 1..20: mol_type = other DNA
caggcaaacagggtctggag

SEQ ID NO: 529 - DNA, 20 bp, synthetic construct
  misc_feature 1..20: note = Synthetic Sequence
  source 1..20: mol_type = other DNA
ctttaagcacttctctgtat

SEQ ID NO: 530 - DNA, 20 bp, synthetic construct
  misc_feature 1..20: note = Synthetic Sequence
  source 1..20: mol_type = other DNA
gctactcgagaggctgaggc

SEQ ID NO: 531 - DNA, 20 bp, synthetic construct
  misc_feature 1..20: note = Synthetic Sequence
  source 1..20: mol_type = other DNA
tggtgtacctgaaagtgatg

SEQ ID NO: 532 - DNA, 20 bp, synthetic construct
  misc_feature 1..20: note = Synthetic Sequence
  source 1..20: mol_type = other DNA
agaacacttggacacaggaa

SEQ ID NO: 533 - DNA, 20 bp, synthetic construct
  misc_feature 1..20: note = Synthetic Sequence
  source 1..20: mol_type = other DNA
gaacacttggacacaggaag

SEQ ID NO: 534 - DNA, 20 bp, synthetic construct
  misc_feature 1..20: note = Synthetic Sequence
  source 1..20: mol_type = other DNA
cagacaggaccctcagctgc

SEQ ID NO: 535 - DNA, 20 bp, synthetic construct
  misc_feature 1..20: note = Synthetic Sequence
  source 1..20: mol_type = other DNA
gcctcagcttcccgagtagc

SEQ ID NO: 536 - DNA, 20 bp, synthetic construct
  misc_feature 1..20: note = Synthetic Sequence
  source 1..20: mol_type = other DNA
gcagaagaatcgcttgaacc

SEQ ID NO: 537 - DNA, 20 bp, synthetic construct
  misc_feature 1..20: note = Synthetic Sequence
  source 1..20: mol_type = other DNA
tcaagagatcaagaccatcc

SEQ ID NO: 538 - DNA, 20 bp, synthetic construct
  misc_feature 1..20: note = Synthetic Sequence
  source 1..20: mol_type = other DNA
caaggcaggtggatcacttg

SEQ ID NO: 539 - DNA, 20 bp, synthetic construct
  misc_feature 1..20: note = Synthetic Sequence
  source 1..20: mol_type = other DNA
gagatggagtttcaccatgt

SEQ ID NO: 540 - DNA, 20 bp, synthetic construct
  misc_feature 1..20: note = Synthetic Sequence
  source 1..20: mol_type = other DNA
ttaatgatcaccattctaac

SEQ ID NO: 541 - DNA, 20 bp, synthetic construct
  misc_feature 1..20: note = Synthetic Sequence
  source 1..20: mol_type = other DNA
acctcatgatccgcccgcct

SEQ ID NO: 542 - DNA, 20 bp, synthetic construct
  misc_feature 1..20: note = Synthetic Sequence
  source 1..20: mol_type = other DNA
aaaaaaagtccaggaccaga

SEQ ID NO: 543 - DNA, 20 bp, synthetic construct
  misc_feature 1..20: note = Synthetic Sequence
  source 1..20: mol_type = other DNA
cactccagaccctgtttgcc

SEQ ID NO: 544 - DNA, 20 bp, synthetic construct
  misc_feature 1..20: note = Synthetic Sequence
  source 1..20: mol_type = other DNA
caggcacctgccaccacgcc

SEQ ID NO: 545 - DNA, 20 bp, synthetic construct
  misc_feature 1..20: note = Synthetic Sequence
  source 1..20: mol_type = other DNA
cccagctattcgggaggctg

SEQ ID NO: 546 - DNA, 20 bp, synthetic construct
  misc_feature 1..20: note = Synthetic Sequence
  source 1..20: mol_type = other DNA
tgaggcaggtggatcacttg

SEQ ID NO: 547 - DNA, 20 bp, synthetic construct
  misc_feature 1..20: note = Synthetic Sequence
  source 1..20: mol_type = other DNA
caggcatgcaccaccacgcc

SEQ ID NO: 548 - DNA, 20 bp, synthetic construct
  misc_feature 1..20: note = Synthetic Sequence
  source 1..20: mol_type = other DNA
tgaggcaggcagatcacctg

SEQ ID NO: 549 - DNA, 20 bp, synthetic construct
  misc_feature 1..20: note = Synthetic Sequence
  source 1..20: mol_type = other DNA
ccccatcaaaaagtgggtga

SEQ ID NO: 550 - DNA, 20 bp, synthetic construct
  misc_feature 1..20: note = Synthetic Sequence
  source 1..20: mol_type = other DNA
gctactcaggagactgaggc

SEQ ID NO: 551 - DNA, 20 bp, synthetic construct
  misc_feature 1..20: note = Synthetic Sequence
  source 1..20: mol_type = other DNA
gctgaggcgggcggatcacg

SEQ ID NO: 552 - DNA, 20 bp, synthetic construct
  misc_feature 1..20: note = Synthetic Sequence
  source 1..20: mol_type = other DNA
gcctcagcctcccgaatagc

SEQ ID NO: 553 - DNA, 20 bp, synthetic construct
  misc_feature 1..20: note = Synthetic Sequence
  source 1..20: mol_type = other DNA
ggcaggtggatcatgaggtc

SEQ ID NO: 554 - DNA, 20 bp, synthetic construct
  misc_feature 1..20: note = Synthetic Sequence
  source 1..20: mol_type = other DNA
actccagaccctgtttgcct

SEQ ID NO: 555 - DNA, 20 bp, synthetic construct
  misc_feature 1..20: note = Synthetic Sequence
  source 1..20: mol_type = other DNA
tcattgatgggcatttgggt

SEQ ID NO: 556 - DNA, 20 bp, synthetic construct
  misc_feature 1..20: note = Synthetic Sequence
  source 1..20: mol_type = other DNA
gctattcgggaggctgaggc

SEQ ID NO: 557 - DNA, 20 bp, synthetic construct
  misc_feature 1..20: note = Synthetic Sequence
  source 1..20: mol_type = other DNA
ctaaaaacacaaaaattagc

SEQ ID NO: 558 - DNA, 20 bp, synthetic construct
  misc_feature 1..20: note = Synthetic Sequence
  source 1..20: mol_type = other DNA
ctcaagtgatctgcccgcct

SEQ ID NO: 559 - DNA, 20 bp, synthetic construct
  misc_feature 1..20: note = Synthetic Sequence
  source 1..20: mol_type = other DNA
gctgaggcgggtggatcacg

SEQ ID NO: 560 - DNA, 20 bp, synthetic construct
  misc_feature 1..20: note = Synthetic Sequence
  source 1..20: mol_type = other DNA
tttcaccatattggtcaggc

SEQ ID NO: 561 - DNA, 20 bp, synthetic construct
  misc_feature 1..20: note = Synthetic Sequence
  source 1..20: mol_type = other DNA
gctactcgggaagctgaggc

SEQ ID NO: 562 - DNA, 20 bp, synthetic construct
  misc_feature 1..20: note = Synthetic Sequence
  source 1..20: mol_type = other DNA
cgaggcaggcggatcacctg

SEQ ID NO: 563 - DNA, 20 bp, synthetic construct
  misc_feature 1..20: note = Synthetic Sequence
  source 1..20: mol_type = other DNA
tttcaccatgttggccaagc

SEQ ID NO: 564 - DNA, 20 bp, synthetic construct
  misc_feature 1..20: note = Synthetic Sequence
  source 1..20: mol_type = other DNA
caccacactgtcttccacaa

SEQ ID NO: 565 - DNA, 20 bp, synthetic construct
  misc_feature 1..20: note = Synthetic Sequence
  source 1..20: mol_type = other DNA
gtgaagaatgcagaagcctc

SEQ ID NO: 566 - DNA, 20 bp, synthetic construct
  misc_feature 1..20: note = Synthetic Sequence
  source 1..20: mol_type = other DNA
aattagccaggtgtggtggt

SEQ ID NO: 567 - DNA, 20 bp, synthetic construct
  misc_feature 1..20: note = Synthetic Sequence
  source 1..20: mol_type = other DNA
aattagccgggcatggtggt

SEQ ID NO: 568 - DNA, 20 bp, synthetic construct
  misc_feature 1..20: note = Synthetic Sequence
  source 1..20: mol_type = other DNA
aattagctgggtgtggtggt

SEQ ID NO: 569 - DNA, 20 bp, synthetic construct
  misc_feature 1..20: note = Synthetic Sequence
  source 1..20: mol_type = other DNA
cgaggcaggtggatcacttg

SEQ ID NO: 570 - DNA, 20 bp, synthetic construct
  misc_feature 1..20: note = Synthetic Sequence
  source 1..20: mol_type = other DNA
gctactcagaaggctgaggc

SEQ ID NO: 571 - DNA, 20 bp, synthetic construct
  misc_feature 1..20: note = Synthetic Sequence
  source 1..20: mol_type = other DNA
ggcaggtggatcacaaggtc

SEQ ID NO: 572 - DNA, 20 bp, synthetic construct
  misc_feature 1..20: note = Synthetic Sequence
  source 1..20: mol_type = other DNA
caggcacccgccaccatgcc

SEQ ID NO: 573 - DNA, 20 bp, synthetic construct
  misc_feature 1..20: note = Synthetic Sequence
  source 1..20: mol_type = other DNA
gccgaggcgggcggatcaca

SEQ ID NO: 574 - DNA, 20 bp, synthetic construct
  misc_feature 1..20: note = Synthetic Sequence
  source 1..20: mol_type = other DNA
gccaaggcgggcggatcacg

SEQ ID NO: 575 - DNA, 20 bp, synthetic construct
  misc_feature 1..20: note = Synthetic Sequence
  source 1..20: mol_type = other DNA
gctacttgagaggctgaggc

SEQ ID NO: 576 - DNA, 20 bp, synthetic construct
  misc_feature 1..20: note = Synthetic Sequence
  source 1..20: mol_type = other DNA
ctcaaaaccgctcaactaca

SEQ ID NO: 577 - DNA, 20 bp, synthetic construct
  misc_feature 1..20: note = Synthetic Sequence
  source 1..20: mol_type = other DNA
ttaaaaatacaaaaattagc

SEQ ID NO: 578 - DNA, 20 bp, synthetic construct
  misc_feature 1..20: note = Synthetic Sequence
  source 1..20: mol_type = other DNA
acataggtatacatgtgcca

SEQ ID NO: 579 - DNA, 20 bp, synthetic construct
  misc_feature 1..20: note = Synthetic Sequence
  source 1..20: mol_type = other DNA
gccgaggtgggcagatcacg

SEQ ID NO: 580 - DNA, 20 bp, synthetic construct
  misc_feature 1..20: note = Synthetic Sequence
  source 1..20: mol_type = other DNA
gccaaggcgggtggatcacg

SEQ ID NO: 581 - DNA, 20 bp, synthetic construct
  misc_feature 1..20: note = Synthetic Sequence
  source 1..20: mol_type = other DNA
ttgtatttctgtgggatcag

SEQ ID NO: 582 - DNA, 20 bp, synthetic construct
  misc_feature 1..20: note = Synthetic Sequence
  source 1..20: mol_type = other DNA
aatacaaaattagctgggca

SEQ ID NO: 583 - DNA, 20 bp, synthetic construct
  misc_feature 1..20: note = Synthetic Sequence
  source 1..20: mol_type = other DNA
gccgaggcaggcagatcacg

SEQ ID NO: 584 - DNA, 20 bp, synthetic construct
  misc_feature 1..20: note = Synthetic Sequence
  source 1..20: mol_type = other DNA
taggtatacatgtgccatgg

SEQ ID NO: 585 - DNA, 20 bp, synthetic construct
  misc_feature 1..20: note = Synthetic Sequence
  source 1..20: mol_type = other DNA
atacccaggcaaacagggtc

SEQ ID NO: 586 - DNA, 20 bp, synthetic construct
  misc_feature 1..20: note = Synthetic Sequence
  source 1..20: mol_type = other DNA
cagaagaatcacttgaaccc

SEQ ID NO: 587 - DNA, 20 bp, synthetic construct
  misc_feature 1..20: note = Synthetic Sequence
  source 1..20: mol_type = other DNA
gggtaatttataaaggaaag

SEQ ID NO: 588 - DNA, 20 bp, synthetic construct
  misc_feature 1..20: note = Synthetic Sequence
  source 1..20: mol_type = other DNA
cactagggagtgccagacag

SEQ ID NO: 589 - DNA, 20 bp, synthetic construct
  misc_feature 1..20: note = Synthetic Sequence
  source 1..20: mol_type = other DNA
ggtaccgggttcatctcact

SEQ ID NO: 590 - DNA, 20 bp, synthetic construct
  misc_feature 1..20: note = Synthetic Sequence
  source 1..20: mol_type = other DNA
tgcatttccatctgaggtac

SEQ ID NO: 591 - DNA, 20 bp, synthetic construct
  misc_feature 1..20: note = Synthetic Sequence
  source 1..20: mol_type = other DNA
gcagaagaatcacttgaacc

SEQ ID NO: 592 - DNA, 20 bp, synthetic construct
  misc_feature 1..20: note = Synthetic Sequence
  source 1..20: mol_type = other DNA
cgccactgcagtccgcagtc

SEQ ID NO: 593 - DNA, 20 bp, synthetic construct
  misc_feature 1..20: note = Synthetic Sequence
  source 1..20: mol_type = other DNA
gagatggggtttcatcatgt

SEQ ID NO: 594 - DNA, 20 bp, synthetic construct
  misc_feature 1..20: note = Synthetic Sequence
  source 1..20: mol_type = other DNA
tttgagttctttgtagattc

SEQ ID NO: 595 - DNA, 20 bp, synthetic construct
  misc_feature 1..20: note = Synthetic Sequence
  source 1..20: mol_type = other DNA
gcaggagaatcgcttgaact

SEQ ID NO: 596 - DNA, 20 bp, synthetic construct
  misc_feature 1..20: note = Synthetic Sequence
  source 1..20: mol_type = other DNA
atgcgatcaactggaagaaa

SEQ ID NO: 597 - DNA, 20 bp, synthetic construct
  misc_feature 1..20: note = Synthetic Sequence
  source 1..20: mol_type = other DNA
tgcagtccgcagtccggcct

SEQ ID NO: 598 - DNA, 20 bp, synthetic construct
  misc_feature 1..20: note = Synthetic Sequence
  source 1..20: mol_type = other DNA
ctgcagtccgcagtccggcc

SEQ ID NO: 599 - DNA, 20 bp, synthetic construct
  misc_feature 1..20: note = Synthetic Sequence
  source 1..20: mol_type = other DNA
ggccggactgcggactgcag

SEQ ID NO: 600 - DNA, 20 bp, synthetic construct
  misc_feature 1..20: note = Synthetic Sequence
  source 1..20: mol_type = other DNA
gagatgggatttcaccatgt

SEQ ID NO: 601 - DNA, 20 bp, synthetic construct
  misc_feature 1..20: note = Synthetic Sequence
  source 1..20: mol_type = other DNA
gctgatggagctgaaaacca

SEQ ID NO: 602 - DNA, 20 bp, synthetic construct
  misc_feature 1..20: note = Synthetic Sequence
  source 1..20: mol_type = other DNA
acaggagaatcgcttgaacc

SEQ ID NO: 603 - DNA, 20 bp, synthetic construct
  misc_feature 1..20: note = Synthetic Sequence
  source 1..20: mol_type = other DNA
actcacagttccacatggct

SEQ ID NO: 604 - DNA, 20 bp, synthetic construct
  misc_feature 1..20: note = Synthetic Sequence
  source 1..20: mol_type = other DNA
atgcacatgtatgtttattg

SEQ ID NO: 605 - DNA, 20 bp, synthetic construct
  misc_feature 1..20: note = Synthetic Sequence
  source 1..20: mol_type = other DNA
aagaatcgcttgaacccagg

SEQ ID NO: 606 - DNA, 20 bp, synthetic construct
  misc_feature 1..20: note = Synthetic Sequence
  source 1..20: mol_type = other DNA
ggcaggcggatcacaaggtc

SEQ ID NO: 607 - DNA, 20 bp, synthetic construct
  misc_feature 1..20: note = Synthetic Sequence
  source 1..20: mol_type = other DNA
ctcacagttccacatggctg

SEQ ID NO: 608 - DNA, 20 bp, synthetic construct
  misc_feature 1..20: note = Synthetic Sequence
  source 1..20: mol_type = other DNA
caggagaatcgcttgaactc

SEQ ID NO: 609 - DNA, 20 bp, synthetic construct
  misc_feature 1..20: note = Synthetic Sequence
  source 1..20: mol_type = other DNA
aaggggaacatcacacactg

SEQ ID NO: 610 - DNA, 20 bp, synthetic construct
  misc_feature 1..20: note = Synthetic Sequence
  source 1..20: mol_type = other DNA
tattcacaatagcaaagaca

SEQ ID NO: 611 - DNA, 20 bp, synthetic construct
  misc_feature 1..20: note = Synthetic Sequence
  source 1..20: mol_type = other DNA
gagacagagtttcaccatgt

SEQ ID NO: 612 - DNA, 20 bp, synthetic construct
  misc_feature 1..20: note = Synthetic Sequence
  source 1..20: mol_type = other DNA
acaggagaattgcttgaacc

SEQ ID NO: 613 - DNA, 20 bp, synthetic construct
  misc_feature 1..20: note = Synthetic Sequence
  source 1..20: mol_type = other DNA
atgcacacatatgtttattg

SEQ ID NO: 614 - DNA, 20 bp, synthetic construct
  misc_feature 1..20: note = Synthetic Sequence
  source 1..20: mol_type = other DNA
cagaagaattgcttgaaccc

SEQ ID NO: 615 - DNA, 20 bp, synthetic construct
  misc_feature 1..20: note = Synthetic Sequence
  source 1..20: mol_type = other DNA
gagacaaggtttcaccatgt

SEQ ID NO: 616 - DNA, 20 bp, synthetic construct
  misc_feature 1..20: note = Synthetic Sequence
  source 1..20: mol_type = other DNA
caggcacccaccaccacgcc

SEQ ID NO: 617 - DNA, 20 bp, synthetic construct
  misc_feature 1..20: note = Synthetic Sequence
  source 1..20: mol_type = other DNA
ggcaggcggatcatgaggtc

SEQ ID NO: 618 - DNA, 20 bp, synthetic construct
  misc_feature 1..20: note = Synthetic Sequence
  source 1..20: mol_type = other DNA
gagatagggtttcaccatgt

SEQ ID NO: 619 - DNA, 20 bp, synthetic construct
  misc_feature 1..20: note = Synthetic Sequence
  source 1..20: mol_type = other DNA
acctcatgatccacctgcct

SEQ ID NO: 620 - DNA, 20 bp, synthetic construct
  misc_feature 1..20: note = Synthetic Sequence
  source 1..20: mol_type = other DNA
tggaggctgaggcaggagaa

SEQ ID NO: 621 - DNA, 20 bp, synthetic construct
  misc_feature 1..20: note = Synthetic Sequence
  source 1..20: mol_type = other DNA
atcattctgataccaaagcc

SEQ ID NO: 622 - DNA, 20 bp, synthetic construct
  misc_feature 1..20: note = Synthetic Sequence
  source 1..20: mol_type = other DNA
gcagaagaattgcttgaacc

SEQ ID NO: 623 - DNA, 20 bp, synthetic construct
  misc_feature 1..20: note = Synthetic Sequence
  source 1..20: mol_type = other DNA
aagaatcacttgaacccagg

SEQ ID NO: 624 - DNA, 20 bp, synthetic construct
  misc_feature 1..20: note = Synthetic Sequence
  source 1..20: mol_type = other DNA
acctcatgatccacccacct

SEQ ID NO: 625 - DNA, 20 bp, synthetic construct
  misc_feature 1..20: note = Synthetic Sequence
  source 1..20: mol_type = other DNA
tttattatactttaagttct

SEQ ID NO: 626 - DNA, 20 bp, synthetic construct
  misc_feature 1..20: note = Synthetic Sequence
  source 1..20: mol_type = other DNA
gcaggagaatcacttgaact

SEQ ID NO: 627 - DNA, 20 bp, synthetic construct
  misc_feature 1..20: note = Synthetic Sequence
  source 1..20: mol_type = other DNA
gcaatctatccatctgacaa

SEQ ID NO: 628 - DNA, 20 bp, synthetic construct
  misc_feature 1..20: note = Synthetic Sequence
  source 1..20: mol_type = other DNA
cggaggctgaggcaggagaa

SEQ ID NO: 629 - DNA, 20 bp, synthetic construct
  misc_feature 1..20: note = Synthetic Sequence
  source 1..20: mol_type = other DNA
gctactcggaaggctgaggc

SEQ ID NO: 630 - DNA, 20 bp, synthetic construct
  misc_feature 1..20: note = Synthetic Sequence
  source 1..20: mol_type = other DNA
caaggcaggcagatcacttg

SEQ ID NO: 631 - DNA, 20 bp, synthetic construct
  misc_feature 1..20: note = Synthetic Sequence
  source 1..20: mol_type = other DNA
caggagaatcgcttgaatcc

SEQ ID NO: 632 - DNA, 20 bp, synthetic construct
  misc_feature 1..20: note = Synthetic Sequence
  source 1..20: mol_type = other DNA
gatgcgatcaactggaagaa

SEQ ID NO: 633 - DNA, 20 bp, synthetic construct
  misc_feature 1..20: note = Synthetic Sequence
  source 1..20: mol_type = other DNA
gccgaggcgggcggatcatg

SEQ ID NO: 634 - DNA, 20 bp, synthetic construct
  misc_feature 1..20: note = Synthetic Sequence
  source 1..20: mol_type = other DNA
ttcacgtagttctcgagcct

SEQ ID NO: 635 - DNA, 20 bp, synthetic construct
  misc_feature 1..20: note = Synthetic Sequence
  source 1..20: mol_type = other DNA
gtgaggcctccccagccatg

SEQ ID NO: 636 - DNA, 20 bp, synthetic construct
  misc_feature 1..20: note = Synthetic Sequence
  source 1..20: mol_type = other DNA
gagacggggtttcaccatct

SEQ ID NO: 637 - DNA, 20 bp, synthetic construct
  misc_feature 1..20: note = Synthetic Sequence
  source 1..20: mol_type = other DNA
ctcaagtgatccgcctgcct

SEQ ID NO: 638 - DNA, 20 bp, synthetic construct
  misc_feature 1..20: note = Synthetic Sequence
  source 1..20: mol_type = other DNA
tttcaccatgctggccaggc

SEQ ID NO: 639 - DNA, 20 bp, synthetic construct
  misc_feature 1..20: note = Synthetic Sequence
  source 1..20: mol_type = other DNA
gatgaacccggtacctcaga

SEQ ID NO: 640 - DNA, 20 bp, synthetic construct
  misc_feature 1..20: note = Synthetic Sequence
  source 1..20: mol_type = other DNA
ctcaagtgatccgcccacct

SEQ ID NO: 641 - DNA, 20 bp, synthetic construct
  misc_feature 1..20: note = Synthetic Sequence
  source 1..20: mol_type = other DNA
tgaggcaggcggatcacctg

SEQ ID NO: 642 - DNA, 20 bp, synthetic construct
  misc_feature 1..20: note = Synthetic Sequence
  source 1..20: mol_type = other DNA
gccgaggcgggtggatcaca

SEQ ID NO: 643 - DNA, 20 bp, synthetic construct
  misc_feature 1..20: note = Synthetic Sequence
  source 1..20: mol_type = other DNA
ccagaggtacaaggaggagc

SEQ ID NO: 644 - DNA, 20 bp, synthetic construct
  misc_feature 1..20: note = Synthetic Sequence
  source 1..20: mol_type = other DNA
gcaggagaatcgcttgaatc

SEQ ID NO: 645 - DNA, 20 bp, synthetic construct
  misc_feature 1..20: note = Synthetic Sequence
  source 1..20: mol_type = other DNA
atgaatgaaatgaagcgaga

SEQ ID NO: 646 - DNA, 20 bp, synthetic construct
  misc_feature 1..20: note = Synthetic Sequence
  source 1..20: mol_type = other DNA
tgaatgaaatgaagcgagaa

SEQ ID NO: 647 - DNA, 20 bp, synthetic construct
  misc_feature 1..20: note = Synthetic Sequence
  source 1..20: mol_type = other DNA
gacgcaataaaaaatgataa

SEQ ID NO: 648 - DNA, 20 bp, synthetic construct
  misc_feature 1..20: note = Synthetic Sequence
  source 1..20: mol_type = other DNA
acgcaataaaaaatgataaa

SEQ ID NO: 649 - DNA, 20 bp, synthetic construct
  misc_feature 1..20: note = Synthetic Sequence
  source 1..20: mol_type = other DNA
caggagaatcacttgaactc

SEQ ID NO: 650 - DNA, 20 bp, synthetic construct
  misc_feature 1..20: note = Synthetic Sequence
  source 1..20: mol_type = other DNA
cgcaataaaaaatgataaag

SEQ ID NO: 651 - DNA, 20 bp, synthetic construct
  misc_feature 1..20: note = Synthetic Sequence
  source 1..20: mol_type = other DNA
gaaatacctaatgtagatga

SEQ ID NO: 652 - DNA, 20 bp, synthetic construct
  misc_feature 1..20: note = Synthetic Sequence
  source 1..20: mol_type = other DNA
ctcacacaaagcctgtttgg

SEQ ID NO: 653 - DNA, 20 bp, synthetic construct
  misc_feature 1..20: note = Synthetic Sequence
  source 1..20: mol_type = other DNA
acaggagaatcacttgaacc

SEQ ID NO: 654 - DNA, 20 bp, synthetic construct
  misc_feature 1..20: note = Synthetic Sequence
  source 1..20: mol_type = other DNA
caggcacccaccaccatgcc

SEQ ID NO: 655 - DNA, 20 bp, synthetic construct
  misc_feature 1..20: note = Synthetic Sequence
  source 1..20: mol_type = other DNA
caggagaactgcttgaaccc

SEQ ID NO: 656 - DNA, 20 bp, synthetic construct
  misc_feature 1..20: note = Synthetic Sequence
  source 1..20: mol_type = other DNA
gagacggggtttcatcatgt

SEQ ID NO: 657 - DNA, 20 bp, synthetic construct
  misc_feature 1..20: note = Synthetic Sequence
  source 1..20: mol_type = other DNA
ttgctcacacaaagcctgtt

SEQ ID NO: 658 - DNA, 20 bp, synthetic construct
  misc_feature 1..20: note = Synthetic Sequence
  source 1..20: mol_type = other DNA
gtccaaaacaccaaaagcaa

SEQ ID NO: 659 - DNA, 20 bp, synthetic construct
  misc_feature 1..20: note = Synthetic Sequence
  source 1..20: mol_type = other DNA
caggagaatcgcttgaacca

SEQ ID NO: 660 - DNA, 20 bp, synthetic construct
  misc_feature 1..20: note = Synthetic Sequence
  source 1..20: mol_type = other DNA
caaggcaggcggatcacctg

SEQ ID NO: 661 - DNA, 20 bp, synthetic construct
  misc_feature 1..20: note = Synthetic Sequence
  source 1..20: mol_type = other DNA
gctgaggtgggtggatcacg

SEQ ID NO: 662 - DNA, 20 bp, synthetic construct
  misc_feature 1..20: note = Synthetic Sequence
  source 1..20: mol_type = other DNA
cgaggcaggcagatcacttg

SEQ ID NO: 663 - DNA, 20 bp, synthetic construct
  misc_feature 1..20: note = Synthetic Sequence
  source 1..20: mol_type = other DNA
gctgaggcgggcagatcacg

SEQ ID NO: 664 - DNA, 20 bp, synthetic construct
  misc_feature 1..20: note = Synthetic Sequence
  source 1..20: mol_type = other DNA
aagaatcacttgaacctggg

SEQ ID NO: 665 - DNA, 20 bp, synthetic construct
  misc_feature 1..20: note = Synthetic Sequence
  source 1..20: mol_type = other DNA
aatactatgcagccataaaa

SEQ ID NO: 666 - DNA, 20 bp, synthetic construct
  misc_feature 1..20: note = Synthetic Sequence
  source 1..20: mol_type = other DNA
gagacagggtttcatcatgt

SEQ ID NO: 667 - DNA, 20 bp, synthetic construct
  misc_feature 1..20: note = Synthetic Sequence
  source 1..20: mol_type = other DNA
caggagaattgcttgaatcc

SEQ ID NO: 668 - DNA, 20 bp, synthetic construct
  misc_feature 1..20: note = Synthetic Sequence
  source 1..20: mol_type = other DNA
ggtacatgtgcacaacatgc

SEQ ID NO: 669 - DNA, 20 bp, synthetic construct
  misc_feature 1..20: note = Synthetic Sequence
  source 1..20: mol_type = other DNA
cccaattaaaagacacagac

SEQ ID NO: 670 - DNA, 20 bp, synthetic construct
  misc_feature 1..20: note = Synthetic Sequence
  source 1..20: mol_type = other DNA
gcaggagaattgcttgaatc

SEQ ID NO: 671 - DNA, 20 bp, synthetic construct
  misc_feature 1..20: note = Synthetic Sequence
  source 1..20: mol_type = other DNA
gcaggagaatagcttgaacc

SEQ ID NO: 672 - DNA, 20 bp, synthetic construct
  misc_feature 1..20: note = Synthetic Sequence
  source 1..20: mol_type = other DNA
gcaggagaattgcttgaact

SEQ ID NO: 673 - DNA, 20 bp, synthetic construct
  misc_feature 1..20: note = Synthetic Sequence
  source 1..20: mol_type = other DNA
ctactcaggaggctgaggca

SEQ ID NO: 674 - DNA, 20 bp, synthetic construct
  misc_feature 1..20: note = Synthetic Sequence
  source 1..20: mol_type = other DNA
gcaggagaatcacttgaatc

SEQ ID NO: 675 - DNA, 20 bp, synthetic construct
  misc_feature 1..20: note = Synthetic Sequence
  source 1..20: mol_type = other DNA
catgagatggtatctcattg

SEQ ID NO: 676 - DNA, 20 bp, synthetic construct
  misc_feature 1..20: note = Synthetic Sequence
  source 1..20: mol_type = other DNA
caggagaatcacttgaatcc

SEQ ID NO: 677 - DNA, 20 bp, synthetic construct
  misc_feature 1..20: note = Synthetic Sequence
  source 1..20: mol_type = other DNA
acctcatgatccgcctgcct

SEQ ID NO: 678 - DNA, 20 bp, synthetic construct
  misc_feature 1..20: note = Synthetic Sequence
  source 1..20: mol_type = other DNA
gccaaggcgggcagatcacg

SEQ ID NO: 679 - DNA, 20 bp, synthetic construct
  misc_feature 1..20: note = Synthetic Sequence
  source 1..20: mol_type = other DNA
gagatggggtttcaccacgt

SEQ ID NO: 680 - DNA, 20 bp, synthetic construct
  misc_feature 1..20: note = Synthetic Sequence
  source 1..20: mol_type = other DNA
gcaggagaactgcttgaacc

SEQ ID NO: 681 - DNA, 20 bp, synthetic construct
  misc_feature 1..20: note = Synthetic Sequence
  source 1..20: mol_type = other DNA
gagaatctcttgaacccagg

SEQ ID NO: 682 - DNA, 20 bp, synthetic construct
  misc_feature 1..20: note = Synthetic Sequence
  source 1..20: mol_type = other DNA
aagaatcgcttgaacctggg

SEQ ID NO: 683 - DNA, 20 bp, synthetic construct
  misc_feature 1..20: note = Synthetic Sequence
  source 1..20: mol_type = other DNA
aaatacaaaaaaaaattagc

SEQ ID NO: 684 - DNA, 20 bp, synthetic construct
  misc_feature 1..20: note = Synthetic Sequence
  source 1..20: mol_type = other DNA
cacatgttctcactcataag

SEQ ID NO: 685 - DNA, 20 bp, synthetic construct
  misc_feature 1..20: note = Synthetic Sequence
  source 1..20: mol_type = other DNA
aatgagaacacttggacaca

SEQ ID NO: 686 - DNA, 20 bp, synthetic construct
  misc_feature 1..20: note = Synthetic Sequence
  source 1..20: mol_type = other DNA
caggagaattgcttgaactc

SEQ ID NO: 687 - DNA, 20 bp, synthetic construct
  misc_feature 1..20: note = Synthetic Sequence
  source 1..20: mol_type = other DNA
taatgtaaatgatgagttaa

SEQ ID NO: 688 - DNA, 20 bp, synthetic construct
  misc_feature 1..20: note = Synthetic Sequence
  source 1..20: mol_type = other DNA
accaatcagcaggatgtggg

SEQ ID NO: 689 - DNA, 20 bp, synthetic construct
  misc_feature 1..20: note = Synthetic Sequence
  source 1..20: mol_type = other DNA
aagaattgcttgaacctggg

SEQ ID NO: 690 - DNA, 20 bp, synthetic construct
  misc_feature 1..20: note = Synthetic Sequence
  source 1..20: mol_type = other DNA
ggaagaaagggtatcagtga

SEQ ID NO: 691 - DNA, 20 bp, synthetic construct
  misc_feature 1..20: note = Synthetic Sequence
  source 1..20: mol_type = other DNA
tggccgaataggaacagctc

SEQ ID NO: 692 - DNA, 20 bp, synthetic construct
  misc_feature 1..20: note = Synthetic Sequence
  source 1..20: mol_type = other DNA
ccaatcagcaggatgtgggt

SEQ ID NO: 693 - DNA, 20 bp, synthetic construct
  misc_feature 1..20: note = Synthetic Sequence
  source 1..20: mol_type = other DNA
gttgatcgcatcggctcctg

SEQ ID NO: 694 - DNA, 20 bp, synthetic construct
  misc_feature 1..20: note = Synthetic Sequence
  source 1..20: mol_type = other DNA
aatgtaaatgatgagttaat

SEQ ID NO: 695 - DNA, 20 bp, synthetic construct
  misc_feature 1..20: note = Synthetic Sequence
  source 1..20: mol_type = other DNA
aaacttacaatcatggcaga

SEQ ID NO: 696 - DNA, 20 bp, synthetic construct
  misc_feature 1..20: note = Synthetic Sequence
  source 1..20: mol_type = other DNA
cccacccacatcctgctgat

SEQ ID NO: 697 - DNA, 20 bp, synthetic construct
  misc_feature 1..20: note = Synthetic Sequence
  source 1..20: mol_type = other DNA
caggagaatagcttgaaccc

SEQ ID NO: 698 - DNA, 20 bp, synthetic construct
  misc_feature 1..20: note = Synthetic Sequence
  source 1..20: mol_type = other DNA
caggagccgatgcgatcaac

SEQ ID NO: 699 - DNA, 20 bp, synthetic construct
  misc_feature 1..20: note = Synthetic Sequence
  source 1..20: mol_type = other DNA
gagacggggtttcaccgtgt

SEQ ID NO: 700 - DNA, 20 bp, synthetic construct
  misc_feature 1..20: note = Synthetic Sequence
  source 1..20: mol_type = other DNA
aagaattgcttgaacccagg

SEQ ID NO: 701 - DNA, 20 bp, synthetic construct
  misc_feature 1..20: note = Synthetic Sequence
  source 1..20: mol_type = other DNA
caagagaatcgcttgaaccc

SEQ ID NO: 702 - DNA, 20 bp, synthetic construct
  misc_feature 1..20: note = Synthetic Sequence
  source 1..20: mol_type = other DNA
gcaggagaatcccttgaacc

SEQ ID NO: 703 - DNA, 20 bp, synthetic construct
  misc_feature 1..20: note = Synthetic Sequence
  source 1..20: mol_type = other DNA
gagaatctcttgaacctggg

SEQ ID NO: 704 - DNA, 20 bp, synthetic construct
  misc_feature 1..20: note = Synthetic Sequence
  source 1..20: mol_type = other DNA
tgaatgcgtcccagagattc

SEQ ID NO: 705 - DNA, 20 bp, synthetic construct
  misc_feature 1..20: note = Synthetic Sequence
  source 1..20: mol_type = other DNA
gagacaggatttcaccatgt

SEQ ID NO: 706 - DNA, 20 bp, synthetic construct
  misc_feature 1..20: note = Synthetic Sequence
  source 1..20: mol_type = other DNA
tcaggagtttgagactagcc

SEQ ID NO: 707 - DNA, 20 bp, synthetic construct
  misc_feature 1..20: note = Synthetic Sequence
  source 1..20: mol_type = other DNA
attattatactttaagttct

SEQ ID NO: 708 - DNA, 20 bp, synthetic construct
  misc_feature 1..20: note = Synthetic Sequence
  source 1..20: mol_type = other DNA
gatatgcggcgttatttctg

SEQ ID NO: 709 - DNA, 20 bp, synthetic construct
  misc_feature 1..20: note = Synthetic Sequence
  source 1..20: mol_type = other DNA
aaggggaacatcacacacca

SEQ ID NO: 710 - DNA, 20 bp, synthetic construct
  misc_feature 1..20: note = Synthetic Sequence
  source 1..20: mol_type = other DNA
caggagaatctcttgaacct

SEQ ID NO: 711 - DNA, 20 bp, synthetic construct
  misc_feature 1..20: note = Synthetic Sequence
  source 1..20: mol_type = other DNA
caatcagcaggatgtgggtg

SEQ ID NO: 712 - DNA, 20 bp, synthetic construct
  misc_feature 1..20: note = Synthetic Sequence
  source 1..20: mol_type = other DNA
attaactcatcatttacatt

SEQ ID NO: 713 - DNA, 20 bp, synthetic construct
  misc_feature 1..20: note = Synthetic Sequence
  source 1..20: mol_type = other DNA
caggcacccgccaccacacc

SEQ ID NO: 714 - DNA, 20 bp, synthetic construct
  misc_feature 1..20: note = Synthetic Sequence
  source 1..20: mol_type = other DNA
tggtggaatgtcatcagtta

SEQ ID NO: 715 - DNA, 20 bp, synthetic construct
  misc_feature 1..20: note = Synthetic Sequence
  source 1..20: mol_type = other DNA
gatatgtggcattatttctg

SEQ ID NO: 716 - DNA, 20 bp, synthetic construct
  misc_feature 1..20: note = Synthetic Sequence
  source 1..20: mol_type = other DNA
gccaaggtgggtggatcacg

SEQ ID NO: 717 - DNA, 20 bp, synthetic construct
  misc_feature 1..20: note = Synthetic Sequence
  source 1..20: mol_type = other DNA
aagaatcgcttgaacccggg

SEQ ID NO: 718 - DNA, 20 bp, synthetic construct
  misc_feature 1..20: note = Synthetic Sequence
  source 1..20: mol_type = other DNA
tattctaagtgaagtaactc

SEQ ID NO: 719 - DNA, 20 bp, synthetic construct
  misc_feature 1..20: note = Synthetic Sequence
  source 1..20: mol_type = other DNA
ataagtctcatgagatctga

SEQ ID NO: 720 - DNA, 20 bp, synthetic construct
  misc_feature 1..20: note = Synthetic Sequence
  source 1..20: mol_type = other DNA
gctgaggtgggcggatcacg

SEQ ID NO: 721 - DNA, 20 bp, synthetic construct
  misc_feature 1..20: note = Synthetic Sequence
  source 1..20: mol_type = other DNA
aatgttaaatgacgagttaa

SEQ ID NO: 722 - DNA, 20 bp, synthetic construct
  misc_feature 1..20: note = Synthetic Sequence
  source 1..20: mol_type = other DNA
cgagatcagcctggccaaca

SEQ ID NO: 723 - DNA, 20 bp, synthetic construct
  misc_feature 1..20: note = Synthetic Sequence
  source 1..20: mol_type = other DNA
tactcaggaggctgaggcag

SEQ ID NO: 724 - DNA, 20 bp, synthetic construct
  misc_feature 1..20: note = Synthetic Sequence
  source 1..20: mol_type = other DNA
atgttaaatgacgagttaat

SEQ ID NO: 725 - DNA, 20 bp, synthetic construct
  misc_feature 1..20: note = Synthetic Sequence
  source 1..20: mol_type = other DNA
gctactcaggaggttgaggc

SEQ ID NO: 726 - DNA, 20 bp, synthetic construct
  misc_feature 1..20: note = Synthetic Sequence
  source 1..20: mol_type = other DNA
tcaggagttcaagaccagtc

SEQ ID NO: 727 - DNA, 20 bp, synthetic construct
  misc_feature 1..20: note = Synthetic Sequence
  source 1..20: mol_type = other DNA
aaatacctaatgtagatgac

SEQ ID NO: 728 - DNA, 20 bp, synthetic construct
  misc_feature 1..20: note = Synthetic Sequence
  source 1..20: mol_type = other DNA
tcaggagatccagaccatcc

SEQ ID NO: 729 - DNA, 20 bp, synthetic construct
  misc_feature 1..20: note = Synthetic Sequence
  source 1..20: mol_type = other DNA
tcaggagatagagaccatcc

SEQ ID NO: 730 - DNA, 20 bp, synthetic construct
  misc_feature 1..20: note = Synthetic Sequence
  source 1..20: mol_type = other DNA
caggcacctgccaccacacc

SEQ ID NO: 731 - DNA, 20 bp, synthetic construct
  misc_feature 1..20: note = Synthetic Sequence
  source 1..20: mol_type = other DNA
gcaagagaatcgcttgaacc

SEQ ID NO: 732 - DNA, 20 bp, synthetic construct
  misc_feature 1..20: note = Synthetic Sequence
  source 1..20: mol_type = other DNA
caggcacatgccaccatgcc

SEQ ID NO: 733 - DNA, 20 bp, synthetic construct
  misc_feature 1..20: note = Synthetic Sequence
  source 1..20: mol_type = other DNA
ttaactcgtcatttaacatt

SEQ ID NO: 734 - DNA, 20 bp, synthetic construct
  misc_feature 1..20: note = Synthetic Sequence
  source 1..20: mol_type = other DNA
tttataaattacccagtctt

SEQ ID NO: 735 - DNA, 20 bp, synthetic construct
  misc_feature 1..20: note = Synthetic Sequence
  source 1..20: mol_type = other DNA
aatacaaaattagccgggtg

SEQ ID NO: 736 - DNA, 20 bp, synthetic construct
  misc_feature 1..20: note = Synthetic Sequence
  source 1..20: mol_type = other DNA
tgttcacaatagcaaagact

SEQ ID NO: 737 - DNA, 20 bp, synthetic construct
  misc_feature 1..20: note = Synthetic Sequence
  source 1..20: mol_type = other DNA
tgaaaatacaaaaattagct

SEQ ID NO: 738 - DNA, 20 bp, synthetic construct
  misc_feature 1..20: note = Synthetic Sequence
  source 1..20: mol_type = other DNA
caggagaatcatttgaaccc

SEQ ID NO: 739 - DNA, 20 bp, synthetic construct
  misc_feature 1..20: note = Synthetic Sequence
  source 1..20: mol_type = other DNA
tgtttatttcacctgggtgc

SEQ ID NO: 740 - DNA, 20 bp, synthetic construct
  misc_feature 1..20: note = Synthetic Sequence
  source 1..20: mol_type = other DNA
gccgaggcgggcagatcaca

SEQ ID NO: 741 - DNA, 20 bp, synthetic construct
  misc_feature 1..20: note = Synthetic Sequence
  source 1..20: mol_type = other DNA
gctgaggcaggcggatcacg

SEQ ID NO: 742 - DNA, 20 bp, synthetic construct
  misc_feature 1..20: note = Synthetic Sequence
  source 1..20: mol_type = other DNA
caggagaatcgtttgaaccc

SEQ ID NO: 743 - DNA, 20 bp, synthetic construct
  misc_feature 1..20: note = Synthetic Sequence
  source 1..20: mol_type = other DNA
tcaggagatcgagaccatct

SEQ ID NO: 744 - DNA, 20 bp, synthetic construct
  misc_feature 1..20: note = Synthetic Sequence
  source 1..20: mol_type = other DNA
gagaacacttggacacaggg

SEQ ID NO: 745 - DNA, 20 bp, synthetic construct
  misc_feature 1..20: note = Synthetic Sequence
  source 1..20: mol_type = other DNA
cagaagaatcgcttgaacct

SEQ ID NO: 746 - DNA, 20 bp, synthetic construct
  misc_feature 1..20: note = Synthetic Sequence
  source 1..20: mol_type = other DNA
catgagaatcacttgaaccc

SEQ ID NO: 747 - DNA, 20 bp, synthetic construct
  misc_feature 1..20: note = Synthetic Sequence
  source 1..20: mol_type = other DNA
gagaatggcttgaacccagg

SEQ ID NO: 748 - DNA, 20 bp, synthetic construct
  misc_feature 1..20: note = Synthetic Sequence
  source 1..20: mol_type = other DNA
tcaggaaatcgagaccatcc

SEQ ID NO: 749 - DNA, 20 bp, synthetic construct
  misc_feature 1..20: note = Synthetic Sequence
  source 1..20: mol_type = other DNA
caagagaatcacttgaaccc

SEQ ID NO: 750 - DNA, 20 bp, synthetic construct
  misc_feature 1..20: note = Synthetic Sequence
  source 1..20: mol_type = other DNA
gctgaggcaggcagatcacg

SEQ ID NO: 751 - DNA, 20 bp, synthetic construct
  misc_feature 1..20: note = Synthetic Sequence
  source 1..20: mol_type = other DNA
gagaatggcttgaacctggg

SEQ ID NO: 752 - DNA, 20 bp, synthetic construct
  misc_feature 1..20: note = Synthetic Sequence
  source 1..20: mol_type = other DNA
aggatttcaccatgttggcc

SEQ ID NO: 753 - DNA, 20 bp, synthetic construct
  misc_feature 1..20: note = Synthetic Sequence
  source 1..20: mol_type = other DNA
gagaatggcttgaacccggg

SEQ ID NO: 754 - DNA, 20 bp, synthetic construct
  misc_feature 1..20: note = Synthetic Sequence
  source 1..20: mol_type = other DNA
gagaggctgaggcaggagaa

SEQ ID NO: 755 - DNA, 20 bp, synthetic construct
  misc_feature 1..20: note = Synthetic Sequence
  source 1..20: mol_type = other DNA
gcaggagaatcgtttgaacc

SEQ ID NO: 756 - DNA, 20 bp, synthetic construct
  misc_feature 1..20: note = Synthetic Sequence
  source 1..20: mol_type = other DNA
gcaggagaatcatttgaacc

SEQ ID NO: 757 - DNA, 20 bp, synthetic construct
  misc_feature 1..20: note = Synthetic Sequence
  source 1..20: mol_type = other DNA
ctcaaaaccactcaactaca

SEQ ID NO: 758 - DNA, 20 bp, synthetic construct
  misc_feature 1..20: note = Synthetic Sequence
  source 1..20: mol_type = other DNA
tgagaccagcctggtcaaca

SEQ ID NO: 759 - DNA, 20 bp, synthetic construct
  misc_feature 1..20: note = Synthetic Sequence
  source 1..20: mol_type = other DNA
tcacacactggggcctgttg

SEQ ID NO: 760 - DNA, 20 bp, synthetic construct
  misc_feature 1..20: note = Synthetic Sequence
  source 1..20: mol_type = other DNA
catcattctgataccaaagc

SEQ ID NO: 761 - DNA, 20 bp, synthetic construct
  misc_feature 1..20: note = Synthetic Sequence
  source 1..20: mol_type = other DNA
gccgaggcaggtggatcatg

SEQ ID NO: 762 - DNA, 20 bp, synthetic construct
  misc_feature 1..20: note = Synthetic Sequence
  source 1..20: mol_type = other DNA
caggaaacttacaatcatgg

SEQ ID NO: 763 - DNA, 20 bp, synthetic construct
  misc_feature 1..20: note = Synthetic Sequence
  source 1..20: mol_type = other DNA
caggagaatggcttgaacct

SEQ ID NO: 764 - DNA, 20 bp, synthetic construct
  misc_feature 1..20: note = Synthetic Sequence
  source 1..20: mol_type = other DNA
gcatgagaatcacttgaacc

SEQ ID NO: 765 - DNA, 20 bp, synthetic construct
  misc_feature 1..20: note = Synthetic Sequence
  source 1..20: mol_type = other DNA
gccaaggtgggcggatcacg

SEQ ID NO: 766 - DNA, 20 bp, synthetic construct
  misc_feature 1..20: note = Synthetic Sequence
  source 1..20: mol_type = other DNA
ttccaacagacctgcagctg

SEQ ID NO: 767 - DNA, 20 bp, synthetic construct
  misc_feature 1..20: note = Synthetic Sequence
  source 1..20: mol_type = other DNA
cgagaccagtctggccaaca

SEQ ID NO: 768 - DNA, 20 bp, synthetic construct
  misc_feature 1..20: note = Synthetic Sequence
  source 1..20: mol_type = other DNA
gagactgggtttcaccatgt

SEQ ID NO: 769 - DNA, 20 bp, synthetic construct
  misc_feature 1..20: note = Synthetic Sequence
  source 1..20: mol_type = other DNA
caggcacccaccaccacacc

SEQ ID NO: 770 - DNA, 20 bp, synthetic construct
  misc_feature 1..20: note = Synthetic Sequence
  source 1..20: mol_type = other DNA
tgagaccagcctggccaacg

SEQ ID NO: 771 - DNA, 20 bp, synthetic construct
  misc_feature 1..20: note = Synthetic Sequence
  source 1..20: mol_type = other DNA
gccgaggtgggtggatcatg

SEQ ID NO: 772 - DNA, 20 bp, synthetic construct
  misc_feature 1..20: note = Synthetic Sequence
  source 1..20: mol_type = other DNA
caagaccagcctggctaaca

SEQ ID NO: 773 - DNA, 20 bp, synthetic construct
  misc_feature 1..20: note = Synthetic Sequence
  source 1..20: mol_type = other DNA
caagaccagcctggccaacg

SEQ ID NO: 774 - DNA, 20 bp, synthetic construct
  misc_feature 1..20: note = Synthetic Sequence
  source 1..20: mol_type = other DNA
gaaatggggtttcaccatgt

SEQ ID NO: 775 - DNA, 20 bp, synthetic construct
  misc_feature 1..20: note = Synthetic Sequence
  source 1..20: mol_type = other DNA
cttacagttccacatggctg

SEQ ID NO: 776 - DNA, 20 bp, synthetic construct
  misc_feature 1..20: note = Synthetic Sequence
  source 1..20: mol_type = other DNA
tgagactagcctggccaaca

SEQ ID NO: 777 - DNA, 20 bp, synthetic construct
  misc_feature 1..20: note = Synthetic Sequence
  source 1..20: mol_type = other DNA
gacttacagttccacatggc

SEQ ID NO: 778 - DNA, 20 bp, synthetic construct
  misc_feature 1..20: note = Synthetic Sequence
  source 1..20: mol_type = other DNA
gccgaggtgggtggatcaca

SEQ ID NO: 779 - DNA, 20 bp, synthetic construct
  misc_feature 1..20: note = Synthetic Sequence
  source 1..20: mol_type = other DNA
gagacagggtttcaccacgt

SEQ ID NO: 780 - DNA, 20 bp, synthetic construct
  misc_feature 1..20: note = Synthetic Sequence
  source 1..20: mol_type = other DNA
gatacatgtgcagaacgtgc

SEQ ID NO: 781 - DNA, 20 bp, synthetic construct
  misc_feature 1..20: note = Synthetic Sequence
  source 1..20: mol_type = other DNA
acttacagttccacatggct

SEQ ID NO: 782 - DNA, 20 bp, synthetic construct
  misc_feature 1..20: note = Synthetic Sequence
  source 1..20: mol_type = other DNA
gcaagagaatcacttgaacc

SEQ ID NO: 783 - DNA, 20 bp, synthetic construct
  misc_feature 1..20: note = Synthetic Sequence
  source 1..20: mol_type = other DNA
agaacttccccaacctagca

SEQ ID NO: 784 - DNA, 20 bp, synthetic construct
  misc_feature 1..20: note = Synthetic Sequence
  source 1..20: mol_type = other DNA
caagagaattgcttgaaccc

SEQ ID NO: 785 - DNA, 20 bp, synthetic construct
  misc_feature 1..20: note = Synthetic Sequence
  source 1..20: mol_type = other DNA
gagaactgcttgaacccagg

SEQ ID NO: 786 - DNA, 20 bp, synthetic construct
  misc_feature 1..20: note = Synthetic Sequence
  source 1..20: mol_type = other DNA
gcagagaattgcttgaaccc

SEQ ID NO: 787 - DNA, 20 bp, synthetic construct
  misc_feature 1..20: note = Synthetic Sequence
  source 1..20: mol_type = other DNA
gctgaggtgggcagatcacg

SEQ ID NO: 788 - DNA, 20 bp, synthetic construct
  misc_feature 1..20: note = Synthetic Sequence
  source 1..20: mol_type = other DNA
cggatcacgaggtcaggaga

SEQ ID NO: 789 - DNA, 20 bp, synthetic construct
  misc_feature 1..20: note = Synthetic Sequence
  source 1..20: mol_type = other DNA
aagaatcacttgaacccggg

SEQ ID NO: 790 - DNA, 20 bp, synthetic construct
  misc_feature 1..20: note = Synthetic Sequence
  source 1..20: mol_type = other DNA
cagaagaatcacttgaacct

SEQ ID NO: 791 - DNA, 20 bp, synthetic construct
  misc_feature 1..20: note = Synthetic Sequence
  source 1..20: mol_type = other DNA
tcaggagtttgagaccagct

SEQ ID NO: 792 - DNA, 20 bp, synthetic construct
  misc_feature 1..20: note = Synthetic Sequence
  source 1..20: mol_type = other DNA
ctcaaaagaagatatacaaa

SEQ ID NO: 793 - DNA, 20 bp, synthetic construct
  misc_feature 1..20: note = Synthetic Sequence
  source 1..20: mol_type = other DNA
tgaacaggcaacctacaaca

SEQ ID NO: 794 - DNA, 20 bp, synthetic construct
  misc_feature 1..20: note = Synthetic Sequence
  source 1..20: mol_type = other DNA
gaacaggcaacctacaacat

SEQ ID NO: 795 - DNA, 20 bp, synthetic construct
  misc_feature 1..20: note = Synthetic Sequence
  source 1..20: mol_type = other DNA
gccgaggcaggtggatcaca

SEQ ID NO: 796 - DNA, 20 bp, synthetic construct
  misc_feature 1..20: note = Synthetic Sequence
  source 1..20: mol_type = other DNA
tgtaaaatggaccaatcagc

SEQ ID NO: 797 - DNA, 20 bp, synthetic construct
  misc_feature 1..20: note = Synthetic Sequence
  source 1..20: mol_type = other DNA
gatacatgtgcagaatgtgc

SEQ ID NO: 798 - DNA, 20 bp, synthetic construct
  misc_feature 1..20: note = Synthetic Sequence
  source 1..20: mol_type = other DNA
gggaggcctcacaatcatgg

SEQ ID NO: 799 - DNA, 20 bp, synthetic construct
  misc_feature 1..20: note = Synthetic Sequence
  source 1..20: mol_type = other DNA
catgagaatcgcttgaaccc

SEQ ID NO: 800 - DNA, 20 bp, synthetic construct
  misc_feature 1..20: note = Synthetic Sequence
  source 1..20: mol_type = other DNA
cagaagaattgcttgaacct

SEQ ID NO: 801 - DNA, 20 bp, synthetic construct
  misc_feature 1..20: note = Synthetic Sequence
  source 1..20: mol_type = other DNA
gcatgagaattgcttgaacc

SEQ ID NO: 802 - DNA, 20 bp, synthetic construct
  misc_feature 1..20: note = Synthetic Sequence
  source 1..20: mol_type = other DNA
gggcacactgacacctcaca

SEQ ID NO: 803 - DNA, 20 bp, synthetic construct
  misc_feature 1..20: note = Synthetic Sequence
  source 1..20: mol_type = other DNA
taggtatacacgtgccatgg

SEQ ID NO: 804 - DNA, 20 bp, synthetic construct
  misc_feature 1..20: note = Synthetic Sequence
  source 1..20: mol_type = other DNA
tcacatgcagagacacacat

SEQ ID NO: 805 - DNA, 20 bp, synthetic construct
  misc_feature 1..20: note = Synthetic Sequence
  source 1..20: mol_type = other DNA
ctgaggcctccccagccatg

SEQ ID NO: 806 - DNA, 20 bp, synthetic construct
  misc_feature 1..20: note = Synthetic Sequence
  source 1..20: mol_type = other DNA
acataggtatacacgtgcca

SEQ ID NO: 807 - DNA, 20 bp, synthetic construct
  misc_feature 1..20: note = Synthetic Sequence
  source 1..20: mol_type = other DNA
aattgactcacagttccaca

SEQ ID NO: 808 - DNA, 20 bp, synthetic construct
  misc_feature 1..20: note = Synthetic Sequence
  source 1..20: mol_type = other DNA
gcaagagaattgcttgaacc

SEQ ID NO: 809 - DNA, 20 bp, synthetic construct
  misc_feature 1..20: note = Synthetic Sequence
  source 1..20: mol_type = other DNA
caggagaattgcttgaacca

SEQ ID NO: 810 - DNA, 20 bp, synthetic construct
  misc_feature 1..20: note = Synthetic Sequence
  source 1..20: mol_type = other DNA
ctggtgatacccaggcaaac

SEQ ID NO: 811 - DNA, 20 bp, synthetic construct
  misc_feature 1..20: note = Synthetic Sequence
  source 1..20: mol_type = other DNA
cacacactggggcctgttgt

SEQ ID NO: 812 - DNA, 20 bp, synthetic construct
  misc_feature 1..20: note = Synthetic Sequence
  source 1..20: mol_type = other DNA
cataaattgtgaagatttca

SEQ ID NO: 813 - DNA, 20 bp, synthetic construct
  misc_feature 1..20: note = Synthetic Sequence
  source 1..20: mol_type = other DNA
ggcctcacaatcatggcaga

SEQ ID NO: 814 - DNA, 20 bp, synthetic construct
  misc_feature 1..20: note = Synthetic Sequence
  source 1..20: mol_type = other DNA
tggtgatacccaggcaaaca

SEQ ID NO: 815 - DNA, 20 bp, synthetic construct
  misc_feature 1..20: note = Synthetic Sequence
  source 1..20: mol_type = other DNA
aattcagctgtgaatccatc

SEQ ID NO: 816 - DNA, 20 bp, synthetic construct
  misc_feature 1..20: note = Synthetic Sequence
  source 1..20: mol_type = other DNA
aaacttacaatcatggtgga

SEQ ID NO: 817 - DNA, 20 bp, synthetic construct
  misc_feature 1..20: note = Synthetic Sequence
  source 1..20: mol_type = other DNA
gaaaaaaagctcatcatcac

SEQ ID NO: 818 - DNA, 20 bp, synthetic construct
  misc_feature 1..20: note = Synthetic Sequence
  source 1..20: mol_type = other DNA
cgaaaccagcctggccaaca

SEQ ID NO: 819 - DNA, 20 bp, synthetic construct
  misc_feature 1..20: note = Synthetic Sequence
  source 1..20: mol_type = other DNA
gagaattgcttgaatctggg

SEQ ID NO: 820 - DNA, 20 bp, synthetic construct
  misc_feature 1..20: note = Synthetic Sequence
  source 1..20: mol_type = other DNA
tgagaccagcctggctaaca

SEQ ID NO: 821 - DNA, 20 bp, synthetic construct
  misc_feature 1..20: note = Synthetic Sequence
  source 1..20: mol_type = other DNA
tcatcagttaaggcaggaac

SEQ ID NO: 822 - DNA, 20 bp, synthetic construct
  misc_feature 1..20: note = Synthetic Sequence
  source 1..20: mol_type = other DNA
gggaggctgagacaggagaa

SEQ ID NO: 823 - DNA, 20 bp, synthetic construct
  misc_feature 1..20: note = Synthetic Sequence
  source 1..20: mol_type = other DNA
gggaggtaattgaatcatgg

SEQ ID NO: 824 - DNA, 20 bp, synthetic construct
  misc_feature 1..20: note = Synthetic Sequence
  source 1..20: mol_type = other DNA
catgagaattgcttgaaccc

SEQ ID NO: 825 - DNA, 20 bp, synthetic construct
  misc_feature 1..20: note = Synthetic Sequence
  source 1..20: mol_type = other DNA
ctcaagtgatccgcccgcct

SEQ ID NO: 826 - DNA, 20 bp, synthetic construct
  misc_feature 1..20: note = Synthetic Sequence
  source 1..20: mol_type = other DNA
caggcagatcacttgaggcc

SEQ ID NO: 827 - DNA, 20 bp, synthetic construct
  misc_feature 1..20: note = Synthetic Sequence
  source 1..20: mol_type = other DNA
tttcaccgtgttggccagga

SEQ ID NO: 828 - DNA, 20 bp, synthetic construct
  misc_feature 1..20: note = Synthetic Sequence
  source 1..20: mol_type = other DNA
gccgaggcaggcggatcatg

SEQ ID NO: 829 - DNA, 20 bp, synthetic construct
  misc_feature 1..20: note = Synthetic Sequence
  source 1..20: mol_type = other DNA
acaaaccctgagctagacac

SEQ ID NO: 830 - DNA, 20 bp, synthetic construct
  misc_feature 1..20: note = Synthetic Sequence
  source 1..20: mol_type = other DNA
aacatgcaggtttgttacat

SEQ ID NO: 831 - DNA, 20 bp, synthetic construct
  misc_feature 1..20: note = Synthetic Sequence
  source 1..20: mol_type = other DNA
agagaccatcctggctaaca

SEQ ID NO: 832 - DNA, 20 bp, synthetic construct
  misc_feature 1..20: note = Synthetic Sequence
  source 1..20: mol_type = other DNA
agcgtgagcgacgcagaaga

SEQ ID NO: 833 - DNA, 20 bp, synthetic construct
  misc_feature 1..20: note = Synthetic Sequence
  source 1..20: mol_type = other DNA
gagaaggggtttcaccatgt

SEQ ID NO: 834 - DNA, 20 bp, synthetic construct
  misc_feature 1..20: note = Synthetic Sequence
  source 1..20: mol_type = other DNA
ggagaccatcctggccaaca

SEQ ID NO: 835 - DNA, 20 bp, synthetic construct
  misc_feature 1..20: note = Synthetic Sequence
  source 1..20: mol_type = other DNA
caaaccctgagctagacaca

SEQ ID NO: 836 - DNA, 20 bp, synthetic construct
  misc_feature 1..20: note = Synthetic Sequence
  source 1..20: mol_type = other DNA
gagaatcgcttgaatccagg

SEQ ID NO: 837 - DNA, 20 bp, synthetic construct
  misc_feature 1..20: note = Synthetic Sequence
  source 1..20: mol_type = other DNA
gagaatcgcttgaactcagg

SEQ ID NO: 838 - DNA, 20 bp, synthetic construct
  misc_feature 1..20: note = Synthetic Sequence
  source 1..20: mol_type = other DNA
aagccattcaacaagtctct

SEQ ID NO: 839 - DNA, 20 bp, synthetic construct
  misc_feature 1..20: note = Synthetic Sequence
  source 1..20: mol_type = other DNA
caagaccagtctggccaaca

SEQ ID NO: 840 - DNA, 20 bp, synthetic construct
  misc_feature 1..20: note = Synthetic Sequence
  source 1..20: mol_type = other DNA
gcatgagaatcgcttgaacc

SEQ ID NO: 841 - DNA, 20 bp, synthetic construct
  misc_feature 1..20: note = Synthetic Sequence
  source 1..20: mol_type = other DNA
aggtcaggagatcgagacca

SEQ ID NO: 842 - DNA, 20 bp, synthetic construct
  misc_feature 1..20: note = Synthetic Sequence
  source 1..20: mol_type = other DNA
acacactggggcctgttgtg

SEQ ID NO: 843 - DNA, 20 bp, synthetic construct
  misc_feature 1..20: note = Synthetic Sequence
  source 1..20: mol_type = other DNA
gagaatcgcttgaaccaggg

SEQ ID NO: 844 - DNA, 20 bp, synthetic construct
  misc_feature 1..20: note = Synthetic Sequence
  source 1..20: mol_type = other DNA
gagacagggtttcaccgtgt

SEQ ID NO: 845 - DNA, 20 bp, synthetic construct
  misc_feature 1..20: note = Synthetic Sequence
  source 1..20: mol_type = other DNA
cgagaccatcttggctaaca

SEQ ID NO: 846 - DNA, 20 bp, synthetic construct
  misc_feature 1..20: note = Synthetic Sequence
  source 1..20: mol_type = other DNA
tggaccaatcagcaggatgt

SEQ ID NO: 847 - DNA, 20 bp, synthetic construct
  misc_feature 1..20: note = Synthetic Sequence
  source 1..20: mol_type = other DNA
ataaagaaaagaggtttaat

SEQ ID NO: 848 - DNA, 20 bp, synthetic construct
  misc_feature 1..20: note = Synthetic Sequence
  source 1..20: mol_type = other DNA
tcactatcatgagaacagca

SEQ ID NO: 849 - DNA, 20 bp, synthetic construct
  misc_feature 1..20: note = Synthetic Sequence
  source 1..20: mol_type = other DNA
taggtatacatgtgccatgt

SEQ ID NO: 850 - DNA, 20 bp, synthetic construct
  misc_feature 1..20: note = Synthetic Sequence
  source 1..20: mol_type = other DNA
caggagaattgcttgaatct

SEQ ID NO: 851 - DNA, 20 bp, synthetic construct
  misc_feature 1..20: note = Synthetic Sequence
  source 1..20: mol_type = other DNA
acactgacacctcacacggc

SEQ ID NO: 852 - DNA, 20 bp, synthetic construct
  misc_feature 1..20: note = Synthetic Sequence
  source 1..20: mol_type = other DNA
caggagaatcacttgaatct

SEQ ID NO: 853 - DNA, 20 bp, synthetic construct
  misc_feature 1..20: note = Synthetic Sequence
  source 1..20: mol_type = other DNA
taatgtagatgatgggttga

SEQ ID NO: 854 - DNA, 20 bp, synthetic construct
  misc_feature 1..20: note = Synthetic Sequence
  source 1..20: mol_type = other DNA
caggagaatcgcttgaatct

SEQ ID NO: 855 - DNA, 20 bp, synthetic construct
  misc_feature 1..20: note = Synthetic Sequence
  source 1..20: mol_type = other DNA
gagaattgcttgaatccagg

SEQ ID NO: 856 - DNA, 20 bp, synthetic construct
  misc_feature 1..20: note = Synthetic Sequence
  source 1..20: mol_type = other DNA
aatgtagatgatgggttgat

SEQ ID NO: 857 - DNA, 20 bp, synthetic construct
  misc_feature 1..20: note = Synthetic Sequence
  source 1..20: mol_type = other DNA
gcctcagcctcccgagtggc

SEQ ID NO: 858 - DNA, 20 bp, synthetic construct
  misc_feature 1..20: note = Synthetic Sequence
  source 1..20: mol_type = other DNA
aagaattgcttgaacccggg

SEQ ID NO: 859 - DNA, 20 bp, synthetic construct
  misc_feature 1..20: note = Synthetic Sequence
  source 1..20: mol_type = other DNA
tttcatcgtgttagccagga

SEQ ID NO: 860 - DNA, 20 bp, synthetic construct
  misc_feature 1..20: note = Synthetic Sequence
  source 1..20: mol_type = other DNA
gagaatcgcttgaatctggg

SEQ ID NO: 861 - DNA, 20 bp, synthetic construct
  misc_feature 1..20: note = Synthetic Sequence
  source 1..20: mol_type = other DNA
gtgggaggtaattgaatcat

SEQ ID NO: 862 - DNA, 20 bp, synthetic construct
  misc_feature 1..20: note = Synthetic Sequence
  source 1..20: mol_type = other DNA
aaacaaccccattaaaaagt

SEQ ID NO: 863 - DNA, 20 bp, synthetic construct
  misc_feature 1..20: note = Synthetic Sequence
  source 1..20: mol_type = other DNA
gcaggaaaatcgcttgaacc

SEQ ID NO: 864 - DNA, 20 bp, synthetic construct
  misc_feature 1..20: note = Synthetic Sequence
  source 1..20: mol_type = other DNA
gaaacagggtttcaccatgt

SEQ ID NO: 865 - DNA, 20 bp, synthetic construct
  misc_feature 1..20: note = Synthetic Sequence
  source 1..20: mol_type = other DNA
cttcctagagacttgttgaa

SEQ ID NO: 866 - DNA, 20 bp, synthetic construct
  misc_feature 1..20: note = Synthetic Sequence
  source 1..20: mol_type = other DNA
aaatacctaatgtagatgat

SEQ ID NO: 867 - DNA, 20 bp, synthetic construct
  misc_feature 1..20: note = Synthetic Sequence
  source 1..20: mol_type = other DNA
caagaccagcttggccaaca

SEQ ID NO: 868 - DNA, 20 bp, synthetic construct
  misc_feature 1..20: note = Synthetic Sequence
  source 1..20: mol_type = other DNA
cactgacacctcacacggca

SEQ ID NO: 869 - DNA, 20 bp, synthetic construct
  misc_feature 1..20: note = Synthetic Sequence
  source 1..20: mol_type = other DNA
atggaccaatcagcaggatg

SEQ ID NO: 870 - DNA, 20 bp, synthetic construct
  misc_feature 1..20: note = Synthetic Sequence
  source 1..20: mol_type = other DNA
gagaatcacttgaatccagg

SEQ ID NO: 871 - DNA, 20 bp, synthetic construct
  misc_feature 1..20: note = Synthetic Sequence
  source 1..20: mol_type = other DNA
cgagaccagcttggccaaca

SEQ ID NO: 872 - DNA, 20 bp, synthetic construct
  misc_feature 1..20: note = Synthetic Sequence
  source 1..20: mol_type = other DNA
ccagaccatcctggctaaca

SEQ ID NO: 873 - DNA, 20 bp, synthetic construct
  misc_feature 1..20: note = Synthetic Sequence
  source 1..20: mol_type = other DNA
aagacagggtttcaccatgt

SEQ ID NO: 874 - DNA, 20 bp, synthetic construct
  misc_feature 1..20: note = Synthetic Sequence
  source 1..20: mol_type = other DNA
tttcaccgtgttagccaaga

SEQ ID NO: 875 - DNA, 20 bp, synthetic construct
  misc_feature 1..20: note = Synthetic Sequence
  source 1..20: mol_type = other DNA
gccgaggtgggcagatcaca

SEQ ID NO: 876 - DNA, 20 bp, synthetic construct
  misc_feature 1..20: note = Synthetic Sequence
  source 1..20: mol_type = other DNA
gggaggctgaggcgggagaa

SEQ ID NO: 877 - DNA, 20 bp, synthetic construct
  misc_feature 1..20: note = Synthetic Sequence
  source 1..20: mol_type = other DNA
gagaatcacttgaatctggg

SEQ ID NO: 878 - DNA, 20 bp, synthetic construct
  misc_feature 1..20: note = Synthetic Sequence
  source 1..20: mol_type = other DNA
caagaccagcctgaccaata

SEQ ID NO: 879 - DNA, 20 bp, synthetic construct
  misc_feature 1..20: note = Synthetic Sequence
  source 1..20: mol_type = other DNA
tgggaggtaattgaatcatg

SEQ ID NO: 880 - DNA, 20 bp, synthetic construct
  misc_feature 1..20: note = Synthetic Sequence
  source 1..20: mol_type = other DNA
ataaagaaaaagaggtttaa

SEQ ID NO: 881 - DNA, 20 bp, synthetic construct
  misc_feature 1..20: note = Synthetic Sequence
  source 1..20: mol_type = other DNA
cgagaccagcctagccaaca

SEQ ID NO: 882 - DNA, 20 bp, synthetic construct
  misc_feature 1..20: note = Synthetic Sequence
  source 1..20: mol_type = other DNA
gctgaggcgggcggatcaca

SEQ ID NO: 883 - DNA, 20 bp, synthetic construct
  misc_feature 1..20: note = Synthetic Sequence
  source 1..20: mol_type = other DNA
tcaggagatcgagactatcc

SEQ ID NO: 884 - DNA, 20 bp, synthetic construct
  misc_feature 1..20: note = Synthetic Sequence
  source 1..20: mol_type = other DNA
caatgcagagaagtccttaa

SEQ ID NO: 885 - DNA, 20 bp, synthetic construct
  misc_feature 1..20: note = Synthetic Sequence
  source 1..20: mol_type = other DNA
gagaatcgcttgaactcggg

SEQ ID NO: 886 - DNA, 20 bp, synthetic construct
  misc_feature 1..20: note = Synthetic Sequence
  source 1..20: mol_type = other DNA
aagatggggtttcaccatgt

SEQ ID NO: 887 - DNA, 20 bp, synthetic construct
  misc_feature 1..20: note = Synthetic Sequence
  source 1..20: mol_type = other DNA
catctgagaccacctcagcc

SEQ ID NO: 888 - DNA, 20 bp, synthetic construct
  misc_feature 1..20: note = Synthetic Sequence
  source 1..20: mol_type = other DNA
tgtgagatgatatctcattg

SEQ ID NO: 889 - DNA, 20 bp, synthetic construct
  misc_feature 1..20: note = Synthetic Sequence
  source 1..20: mol_type = other DNA
atcaacccatcatctacatt

SEQ ID NO: 890 - DNA, 20 bp, synthetic construct
  misc_feature 1..20: note = Synthetic Sequence
  source 1..20: mol_type = other DNA
gggatatgatggcttagctt

SEQ ID NO: 891 - DNA, 20 bp, synthetic construct
  misc_feature 1..20: note = Synthetic Sequence
  source 1..20: mol_type = other DNA
gccactcgggaggctgaggc

SEQ ID NO: 892 - DNA, 20 bp, synthetic construct
  misc_feature 1..20: note = Synthetic Sequence
  source 1..20: mol_type = other DNA
ttaatccagtctatcgttgt

SEQ ID NO: 893 - DNA, 20 bp, synthetic construct
  misc_feature 1..20: note = Synthetic Sequence
  source 1..20: mol_type = other DNA
gtgtgaagagaccaccaaac

SEQ ID NO: 894 - DNA, 20 bp, synthetic construct
  misc_feature 1..20: note = Synthetic Sequence
  source 1..20: mol_type = other DNA
gagaatcacttgaactcagg

SEQ ID NO: 895 - DNA, 20 bp, synthetic construct
  misc_feature 1..20: note = Synthetic Sequence
  source 1..20: mol_type = other DNA
tcagaagatcgagaccatcc

SEQ ID NO: 896 - DNA, 20 bp, synthetic construct
  misc_feature 1..20: note = Synthetic Sequence
  source 1..20: mol_type = other DNA
caggagaactgcttgaacct

SEQ ID NO: 897 - DNA, 20 bp, synthetic construct
  misc_feature 1..20: note = Synthetic Sequence
  source 1..20: mol_type = other DNA
gctacccgggaggctgaggc

SEQ ID NO: 898 - DNA, 20 bp, synthetic construct
  misc_feature 1..20: note = Synthetic Sequence
  source 1..20: mol_type = other DNA
ccccattaaaaagtgggcaa

SEQ ID NO: 899 - DNA, 20 bp, synthetic construct
  misc_feature 1..20: note = Synthetic Sequence
  source 1..20: mol_type = other DNA
catgagaatcacttgaacct

SEQ ID NO: 900 - DNA, 20 bp, synthetic construct
  misc_feature 1..20: note = Synthetic Sequence
  source 1..20: mol_type = other DNA
aaaagccaaaatagacaaat

SEQ ID NO: 901 - DNA, 20 bp, synthetic construct
  misc_feature 1..20: note = Synthetic Sequence
  source 1..20: mol_type = other DNA
gggaggctgaggcaagagaa

SEQ ID NO: 902 - DNA, 20 bp, synthetic construct
  misc_feature 1..20: note = Synthetic Sequence
  source 1..20: mol_type = other DNA
gagaatcgcttgaacctagg

SEQ ID NO: 903 - DNA, 20 bp, synthetic construct
  misc_feature 1..20: note = Synthetic Sequence
  source 1..20: mol_type = other DNA
gcgtgagcgacgcagaagac

SEQ ID NO: 904 - DNA, 20 bp, synthetic construct
  misc_feature 1..20: note = Synthetic Sequence
  source 1..20: mol_type = other DNA
tcacacaccagggcctgttg

SEQ ID NO: 905 - DNA, 20 bp, synthetic construct
  misc_feature 1..20: note = Synthetic Sequence
  source 1..20: mol_type = other DNA
gagaatcgcttgaacccaga

SEQ ID NO: 906 - DNA, 20 bp, synthetic construct
  misc_feature 1..20: note = Synthetic Sequence
  source 1..20: mol_type = other DNA
tagatcccatttgtctattt

SEQ ID NO: 907 - DNA, 20 bp, synthetic construct
  misc_feature 1..20: note = Synthetic Sequence
  source 1..20: mol_type = other DNA
gagaactgcttgaacccggg

SEQ ID NO: 908 - DNA, 20 bp, synthetic construct
  misc_feature 1..20: note = Synthetic Sequence
  source 1..20: mol_type = other DNA
ctttaaggacttctctgcat

SEQ ID NO: 909 - DNA, 20 bp, synthetic construct
  misc_feature 1..20: note = Synthetic Sequence
  source 1..20: mol_type = other DNA
gaggcagggtttcaccatgt

SEQ ID NO: 910 - DNA, 20 bp, synthetic construct
  misc_feature 1..20: note = Synthetic Sequence
  source 1..20: mol_type = other DNA
caaaagccaaaatagacaaa

SEQ ID NO: 911 - DNA, 20 bp, synthetic construct
  misc_feature 1..20: note = Synthetic Sequence
  source 1..20: mol_type = other DNA
ggggatatgatggcttagct

SEQ ID NO: 912 - DNA, 20 bp, synthetic construct
  misc_feature 1..20: note = Synthetic Sequence
  source 1..20: mol_type = other DNA
taggagaatcacttgaaccc

SEQ ID NO: 913 - DNA, 20 bp, synthetic construct
  misc_feature 1..20: note = Synthetic Sequence
  source 1..20: mol_type = other DNA
ggaaggctgaggcaggagaa

SEQ ID NO: 914 - DNA, 20 bp, synthetic construct
  misc_feature 1..20: note = Synthetic Sequence
  source 1..20: mol_type = other DNA
gtagagacggggtttcaccg

SEQ ID NO: 915 - DNA, 20 bp, synthetic construct
  misc_feature 1..20: note = Synthetic Sequence
  source 1..20: mol_type = other DNA
cctcagcctcccgtgtagct

SEQ ID NO: 916 - DNA, 20 bp, synthetic construct
  misc_feature 1..20: note = Synthetic Sequence
  source 1..20: mol_type = other DNA
caaggcaggcggatcacttg

SEQ ID NO: 917 - DNA, 20 bp, synthetic construct
  misc_feature 1..20: note = Synthetic Sequence
  source 1..20: mol_type = other DNA
ggtctcaaactcctgacttc

SEQ ID NO: 918 - DNA, 20 bp, synthetic construct
  misc_feature 1..20: note = Synthetic Sequence
  source 1..20: mol_type = other DNA
attggacttacagttccaca

SEQ ID NO: 919 - DNA, 20 bp, synthetic construct
  misc_feature 1..20: note = Synthetic Sequence
  source 1..20: mol_type = other DNA
cacaagaatcacttgaaccc

SEQ ID NO: 920 - DNA, 20 bp, synthetic construct
  misc_feature 1..20: note = Synthetic Sequence
  source 1..20: mol_type = other DNA
gggaggctgaagcaggagaa

SEQ ID NO: 921 - DNA, 20 bp, synthetic construct
  misc_feature 1..20: note = Synthetic Sequence
  source 1..20: mol_type = other DNA
ttggaataccctgccgtgtg

SEQ ID NO: 922 - DNA, 20 bp, synthetic construct
  misc_feature 1..20: note = Synthetic Sequence
  source 1..20: mol_type = other DNA
gctgaggcaggtggatcatg

SEQ ID NO: 923 - DNA, 20 bp, synthetic construct
  misc_feature 1..20: note = Synthetic Sequence
  source 1..20: mol_type = other DNA
gcctcagcctcccgtgtagc

SEQ ID NO: 924 - DNA, 20 bp, synthetic construct
  misc_feature 1..20: note = Synthetic Sequence
  source 1..20: mol_type = other DNA
caggagaattgtttgaaccc

SEQ ID NO: 925 - DNA, 20 bp, synthetic construct
  misc_feature 1..20: note = Synthetic Sequence
  source 1..20: mol_type = other DNA
gagaatcacttgaaccctgg

SEQ ID NO: 926 - DNA, 20 bp, synthetic construct
  misc_feature 1..20: note = Synthetic Sequence
  source 1..20: mol_type = other DNA
gccacttgggaggctgaggc

SEQ ID NO: 927 - DNA, 20 bp, synthetic construct
  misc_feature 1..20: note = Synthetic Sequence
  source 1..20: mol_type = other DNA
cccagctacacgggaggctg

SEQ ID NO: 928 - DNA, 20 bp, synthetic construct
  misc_feature 1..20: note = Synthetic Sequence
  source 1..20: mol_type = other DNA
caggagaatcgcttgagccc

SEQ ID NO: 929 - DNA, 20 bp, synthetic construct
  misc_feature 1..20: note = Synthetic Sequence
  source 1..20: mol_type = other DNA
gagaatagcttgaacccagg

SEQ ID NO: 930 - DNA, 20 bp, synthetic construct
  misc_feature 1..20: note = Synthetic Sequence
  source 1..20: mol_type = other DNA
gctaggggagggatagcatt

SEQ ID NO: 931 - DNA, 20 bp, synthetic construct
  misc_feature 1..20: note = Synthetic Sequence
  source 1..20: mol_type = other DNA
gagatggggtttcaccatgc

SEQ ID NO: 932 - DNA, 20 bp, synthetic construct
  misc_feature 1..20: note = Synthetic Sequence
  source 1..20: mol_type = other DNA
catgagaattgcttgaacct

SEQ ID NO: 933 - DNA, 20 bp, synthetic construct
  misc_feature 1..20: note = Synthetic Sequence
  source 1..20: mol_type = other DNA
caaaaaaaattagccgggcg

SEQ ID NO: 934 - DNA, 20 bp, synthetic construct
  misc_feature 1..20: note = Synthetic Sequence
  source 1..20: mol_type = other DNA
gagaatcatttgaacccagg

SEQ ID NO: 935 - DNA, 20 bp, synthetic construct
  misc_feature 1..20: note = Synthetic Sequence
  source 1..20: mol_type = other DNA
tatttcacctgggtgcaggc

SEQ ID NO: 936 - DNA, 20 bp, synthetic construct
  misc_feature 1..20: note = Synthetic Sequence
  source 1..20: mol_type = other DNA
tgagaccagcttggccaaca

SEQ ID NO: 937 - DNA, 20 bp, synthetic construct
  misc_feature 1..20: note = Synthetic Sequence
  source 1..20: mol_type = other DNA
cgaggcaggcggatcacttg

SEQ ID NO: 938 - DNA, 20 bp, synthetic construct
  misc_feature 1..20: note = Synthetic Sequence
  source 1..20: mol_type = other DNA
gagaatcacttgaaccaggg

SEQ ID NO: 939 - DNA, 20 bp, synthetic construct
  misc_feature 1..20: note = Synthetic Sequence
  source 1..20: mol_type = other DNA
tgaggcaggcggatcacttg

SEQ ID NO: 940 - DNA, 20 bp, synthetic construct
  misc_feature 1..20: note = Synthetic Sequence
  source 1..20: mol_type = other DNA
gagaatcgcttgaatccggg

SEQ ID NO: 941 - DNA, 20 bp, synthetic construct
  misc_feature 1..20: note = Synthetic Sequence
  source 1..20: mol_type = other DNA
aatgtagatgacgggttgat

SEQ ID NO: 942 - DNA, 20 bp, synthetic construct
  misc_feature 1..20: note = Synthetic Sequence
  source 1..20: mol_type = other DNA
cagaagaatggcgtgaaccc

SEQ ID NO: 943 - DNA, 20 bp, synthetic construct
  misc_feature 1..20: note = Synthetic Sequence
  source 1..20: mol_type = other DNA
gagaatcacttgaactcggg

SEQ ID NO: 944 - DNA, 20 bp, synthetic construct
  misc_feature 1..20: note = Synthetic Sequence
  source 1..20: mol_type = other DNA
taatgtagatgacgggttga

SEQ ID NO: 945 - DNA, 20 bp, synthetic construct
  misc_feature 1..20: note = Synthetic Sequence
  source 1..20: mol_type = other DNA
cgagaccagcctggccagca

SEQ ID NO: 946 - DNA, 20 bp, synthetic construct
  misc_feature 1..20: note = Synthetic Sequence
  source 1..20: mol_type = other DNA
gctacacgggaggctgaggc

SEQ ID NO: 947 - DNA, 20 bp, synthetic construct
  misc_feature 1..20: note = Synthetic Sequence
  source 1..20: mol_type = other DNA
caggagaatcccttgaacct

SEQ ID NO: 948 - DNA, 20 bp, synthetic construct
  misc_feature 1..20: note = Synthetic Sequence
  source 1..20: mol_type = other DNA
gccgaggtgggcagatcatg

SEQ ID NO: 949 - DNA, 20 bp, synthetic construct
  misc_feature 1..20: note = Synthetic Sequence
  source 1..20: mol_type = other DNA
cgagaccatcctggctaata

SEQ ID NO: 950 - DNA, 20 bp, synthetic construct
  misc_feature 1..20: note = Synthetic Sequence
  source 1..20: mol_type = other DNA
gagaattgcttgaaccaggg

SEQ ID NO: 951 - DNA, 20 bp, synthetic construct
  misc_feature 1..20: note = Synthetic Sequence
  source 1..20: mol_type = other DNA
gagaatggcgtgaacccgga

SEQ ID NO: 952 - DNA, 20 bp, synthetic construct
  misc_feature 1..20: note = Synthetic Sequence
  source 1..20: mol_type = other DNA
ggcaggagaatcgcttgaac

SEQ ID NO: 953 - DNA, 20 bp, synthetic construct
  misc_feature 1..20: note = Synthetic Sequence
  source 1..20: mol_type = other DNA
gactcagcccgcctgcaccc

SEQ ID NO: 954 - DNA, 20 bp, synthetic construct
  misc_feature 1..20: note = Synthetic Sequence
  source 1..20: mol_type = other DNA
cacacaccagggcctgttgt

SEQ ID NO: 955 - DNA, 20 bp, synthetic construct
  misc_feature 1..20: note = Synthetic Sequence
  source 1..20: mol_type = other DNA
ccagataagagaataaaagc

SEQ ID NO: 956 - DNA, 20 bp, synthetic construct
  misc_feature 1..20: note = Synthetic Sequence
  source 1..20: mol_type = other DNA
tggaactgggtaacaggcag

SEQ ID NO: 957 - DNA, 20 bp, synthetic construct
  misc_feature 1..20: note = Synthetic Sequence
  source 1..20: mol_type = other DNA
aagtgagaacatgtggtatt

SEQ ID NO: 958 - DNA, 20 bp, synthetic construct
  misc_feature 1..20: note = Synthetic Sequence
  source 1..20: mol_type = other DNA
caggagaatggcctgaaccc

SEQ ID NO: 959 - DNA, 20 bp, synthetic construct
  misc_feature 1..20: note = Synthetic Sequence
  source 1..20: mol_type = other DNA
tcaggagatcgagaccattc

SEQ ID NO: 960 - DNA, 20 bp, synthetic construct
  misc_feature 1..20: note = Synthetic Sequence
  source 1..20: mol_type = other DNA
gccgagacgggcggatcacg

SEQ ID NO: 961 - DNA, 20 bp, synthetic construct
  misc_feature 1..20: note = Synthetic Sequence
  source 1..20: mol_type = other DNA
tggagggctcagaagaagac

SEQ ID NO: 962 - DNA, 20 bp, synthetic construct
  misc_feature 1..20: note = Synthetic Sequence
  source 1..20: mol_type = other DNA
atcaacccgtcatctacatt

SEQ ID NO: 963 - DNA, 20 bp, synthetic construct
  misc_feature 1..20: note = Synthetic Sequence
  source 1..20: mol_type = other DNA
ccccaccccacaacagtccc

SEQ ID NO: 964 - DNA, 20 bp, synthetic construct
  misc_feature 1..20: note = Synthetic Sequence
  source 1..20: mol_type = other DNA
acctactcaagcctcagcaa

SEQ ID NO: 965 - DNA, 20 bp, synthetic construct
  misc_feature 1..20: note = Synthetic Sequence
  source 1..20: mol_type = other DNA
ccaatcagcactctgtaaaa

SEQ ID NO: 966 - DNA, 20 bp, synthetic construct
  misc_feature 1..20: note = Synthetic Sequence
  source 1..20: mol_type = other DNA
gctgaggcgggcggatcatg

SEQ ID NO: 967 - DNA, 20 bp, synthetic construct
  misc_feature 1..20: note = Synthetic Sequence
  source 1..20: mol_type = other DNA
caggagaatcatttgaacct

SEQ ID NO: 968 - DNA, 20 bp, synthetic construct
  misc_feature 1..20: note = Synthetic Sequence
  source 1..20: mol_type = other DNA
gagaatcccttgaacctggg

SEQ ID NO: 969 - DNA, 20 bp, synthetic construct
  misc_feature 1..20: note = Synthetic Sequence
  source 1..20: mol_type = other DNA
ttggagttcattgtagattc

SEQ ID NO: 970 - DNA, 20 bp, synthetic construct
  misc_feature 1..20: note = Synthetic Sequence
  source 1..20: mol_type = other DNA
gagaatcatttgaacctggg

SEQ ID NO: 971 - DNA, 20 bp, synthetic construct
  misc_feature 1..20: note = Synthetic Sequence
  source 1..20: mol_type = other DNA
caggaaaatcacttgaaccc

SEQ ID NO: 972 - DNA, 20 bp, synthetic construct
  misc_feature 1..20: note = Synthetic Sequence
  source 1..20: mol_type = other DNA
tttatccagtctatcactga

SEQ ID NO: 973 - DNA, 20 bp, synthetic construct
  misc_feature 1..20: note = Synthetic Sequence
  source 1..20: mol_type = other DNA
aagacggggtttcaccatgt

SEQ ID NO: 974 - DNA, 20 bp, synthetic construct
  misc_feature 1..20: note = Synthetic Sequence
  source 1..20: mol_type = other DNA
acacaccagggcctgttgtg

SEQ ID NO: 975 - DNA, 20 bp, synthetic construct
  misc_feature 1..20: note = Synthetic Sequence
  source 1..20: mol_type = other DNA
gagaatcgcttgaacttggg

SEQ ID NO: 976 - DNA, 20 bp, synthetic construct
  misc_feature 1..20: note = Synthetic Sequence
  source 1..20: mol_type = other DNA
caagagaatcgcttgaacct

SEQ ID NO: 977 - DNA, 20 bp, synthetic construct
  misc_feature 1..20: note = Synthetic Sequence
  source 1..20: mol_type = other DNA
gcagaagaatggcgtgaacc

SEQ ID NO: 978 - DNA, 20 bp, synthetic construct
  misc_feature 1..20: note = Synthetic Sequence
  source 1..20: mol_type = other DNA
caggagaatcgcttgaactt

SEQ ID NO: 979 - DNA, 20 bp, synthetic construct
  misc_feature 1..20: note = Synthetic Sequence
  source 1..20: mol_type = other DNA
gcacaagaatcacttgaacc

SEQ ID NO: 980 - DNA, 20 bp, synthetic construct
  misc_feature 1..20: note = Synthetic Sequence
  source 1..20: mol_type = other DNA
gcaggaaaatcacttgaacc

SEQ ID NO: 981 - DNA, 20 bp, synthetic construct
  misc_feature 1..20: note = Synthetic Sequence
  source 1..20: mol_type = other DNA
gaggggaacatcacacacca

SEQ ID NO: 982 - DNA, 20 bp, synthetic construct
  misc_feature 1..20: note = Synthetic Sequence
  source 1..20: mol_type = other DNA
taaaggaaaattacagtcaa

SEQ ID NO: 983 - DNA, 20 bp, synthetic construct
  misc_feature 1..20: note = Synthetic Sequence
  source 1..20: mol_type = other DNA
cagacagggtttcaccatgt

SEQ ID NO: 984 - DNA, 20 bp, synthetic construct
  misc_feature 1..20: note = Synthetic Sequence
  source 1..20: mol_type = other DNA
gagaattgcttgaacctagg

SEQ ID NO: 985 - DNA, 20 bp, synthetic construct
  misc_feature 1..20: note = Synthetic Sequence
  source 1..20: mol_type = other DNA
aaaggaaaattacagtcaaa

SEQ ID NO: 986 - DNA, 20 bp, synthetic construct
  misc_feature 1..20: note = Synthetic Sequence
  source 1..20: mol_type = other DNA
caggagaattacttgaaccc

SEQ ID NO: 987 - DNA, 20 bp, synthetic construct
  misc_feature 1..20: note = Synthetic Sequence
  source 1..20: mol_type = other DNA
tatttacaatagcaaagact

SEQ ID NO: 988 - DNA, 20 bp, synthetic construct
  misc_feature 1..20: note = Synthetic Sequence
  source 1..20: mol_type = other DNA
cacgagaatcgcttgaaccc

SEQ ID NO: 989 - DNA, 20 bp, synthetic construct
  misc_feature 1..20: note = Synthetic Sequence
  source 1..20: mol_type = other DNA
aatacaaaaaaaaaattagc

SEQ ID NO: 990 - DNA, 20 bp, synthetic construct
  misc_feature 1..20: note = Synthetic Sequence
  source 1..20: mol_type = other DNA
ccaatcagctctctgtaaaa

SEQ ID NO: 991 - DNA, 20 bp, synthetic construct
  misc_feature 1..20: note = Synthetic Sequence
  source 1..20: mol_type = other DNA
gtctatcgttgttggacatt

SEQ ID NO: 992 - DNA, 20 bp, synthetic construct
  misc_feature 1..20: note = Synthetic Sequence
  source 1..20: mol_type = other DNA
caagagaatcacttgaacct

SEQ ID NO: 993 - DNA, 20 bp, synthetic construct
  misc_feature 1..20: note = Synthetic Sequence
  source 1..20: mol_type = other DNA
gagaatcgtttgaacctggg

SEQ ID NO: 994 - DNA, 20 bp, synthetic construct
  misc_feature 1..20: note = Synthetic Sequence
  source 1..20: mol_type = other DNA
ggaagaaagggtatcagcga

SEQ ID NO: 995 - DNA, 20 bp, synthetic construct
  misc_feature 1..20: note = Synthetic Sequence
  source 1..20: mol_type = other DNA
gagaattgcttgaaccctgg

SEQ ID NO: 996 - DNA, 20 bp, synthetic construct
  misc_feature 1..20: note = Synthetic Sequence
  source 1..20: mol_type = other DNA
agtgaagctgcagaccttcg

SEQ ID NO: 997 - DNA, 20 bp, synthetic construct
  misc_feature 1..20: note = Synthetic Sequence
  source 1..20: mol_type = other DNA
tttcaccgtattagccagga

SEQ ID NO: 998 - DNA, 20 bp, synthetic construct
  misc_feature 1..20: note = Synthetic Sequence
  source 1..20: mol_type = other DNA
gcacgagaatcacttgaacc

SEQ ID NO: 999 - DNA, 20 bp, synthetic construct
  misc_feature 1..20: note = Synthetic Sequence
  source 1..20: mol_type = other DNA
aaggaaaattacagtcaaag

SEQ ID NO: 1000 - DNA, 20 bp, synthetic construct
  misc_feature 1..20: note = Synthetic Sequence
  source 1..20: mol_type = other DNA
gcaggagaatggcctgaacc

SEQ ID NO: 1001 - DNA, 20 bp, synthetic construct
  misc_feature 1..20: note = Synthetic Sequence
  source 1..20: mol_type = other DNA
cactatcatgagaacagcat

SEQ ID NO: 1002 - DNA, 20 bp, synthetic construct
  misc_feature 1..20: note = Synthetic Sequence
  source 1..20: mol_type = other DNA
gcaggagaattacttgaacc

SEQ ID NO: 1003 - DNA, 20 bp, synthetic construct
  misc_feature 1..20: note = Synthetic Sequence
  source 1..20: mol_type = other DNA
gagaattgcttgaatccggg

SEQ ID NO: 1004 - DNA, 20 bp, synthetic construct
  misc_feature 1..20: note = Synthetic Sequence
  source 1..20: mol_type = other DNA
gagaatcgtttgaacccagg

SEQ ID NO: 1005 - DNA, 20 bp, synthetic construct
  misc_feature 1..20: note = Synthetic Sequence
  source 1..20: mol_type = other DNA
atacccagtagtgggattgc

SEQ ID NO: 1006 - DNA, 20 bp, synthetic construct
  misc_feature 1..20: note = Synthetic Sequence
  source 1..20: mol_type = other DNA
agctgtaacactcaccgcga

SEQ ID NO: 1007 - DNA, 20 bp, synthetic construct
  misc_feature 1..20: note = Synthetic Sequence
  source 1..20: mol_type = other DNA
cgagactatcctggctaaca

SEQ ID NO: 1008 - DNA, 20 bp, synthetic construct
  misc_feature 1..20: note = Synthetic Sequence
  source 1..20: mol_type = other DNA
ggtaacccaacctttctctc

SEQ ID NO: 1009 - DNA, 20 bp, synthetic construct
  misc_feature 1..20: note = Synthetic Sequence
  source 1..20: mol_type = other DNA
tgtgattcttcagttacttc

SEQ ID NO: 1010 - DNA, 20 bp, synthetic construct
  misc_feature 1..20: note = Synthetic Sequence
  source 1..20: mol_type = other DNA
cctcagcctccccagcagct

SEQ ID NO: 1011 - DNA, 20 bp, synthetic construct
  misc_feature 1..20: note = Synthetic Sequence
  source 1..20: mol_type = other DNA
gctaagctatgaggatgcaa

SEQ ID NO: 1012 - DNA, 20 bp, synthetic construct
  misc_feature 1..20: note = Synthetic Sequence
  source 1..20: mol_type = other DNA
gatctcaaactcctgacctc

SEQ ID NO: 1013 - DNA, 20 bp, synthetic construct
  misc_feature 1..20: note = Synthetic Sequence
  source 1..20: mol_type = other DNA
gctgaggtgggtggatcatg

SEQ ID NO: 1014 - DNA, 20 bp, synthetic construct
  misc_feature 1..20: note = Synthetic Sequence
  source 1..20: mol_type = other DNA
tcaggagatcgagaccaccc

SEQ ID NO: 1015 - DNA, 20 bp, synthetic construct
  misc_feature 1..20: note = Synthetic Sequence
  source 1..20: mol_type = other DNA
gagaatagcttgaacccggg

SEQ ID NO: 1016 - DNA, 20 bp, synthetic construct
  misc_feature 1..20: note = Synthetic Sequence
  source 1..20: mol_type = other DNA
catgagaatcgcttgaacct

SEQ ID NO: 1017 - DNA, 20 bp, synthetic construct
  misc_feature 1..20: note = Synthetic Sequence
  source 1..20: mol_type = other DNA
cagaagaagacaggaaaatg

SEQ ID NO: 1018 - DNA, 20 bp, synthetic construct
  misc_feature 1..20: note = Synthetic Sequence
  source 1..20: mol_type = other DNA
gcaggagaatcgcttaaacc

SEQ ID NO: 1019 - DNA, 20 bp, synthetic construct
  misc_feature 1..20: note = Synthetic Sequence
  source 1..20: mol_type = other DNA
gaagaaatgctcatcatcac

SEQ ID NO: 1020 - DNA, 20 bp, synthetic construct
  misc_feature 1..20: note = Synthetic Sequence
  source 1..20: mol_type = other DNA
aatcacttgaacctgggaga

SEQ ID NO: 1021 - DNA, 20 bp, synthetic construct
  misc_feature 1..20: note = Synthetic Sequence
  source 1..20: mol_type = other DNA
tcaggagttcgaggccagcc

SEQ ID NO: 1022 - DNA, 20 bp, synthetic construct
  misc_feature 1..20: note = Synthetic Sequence
  source 1..20: mol_type = other DNA
agccaggatgagccaggaga

SEQ ID NO: 1023 - DNA, 20 bp, synthetic construct
  misc_feature 1..20: note = Synthetic Sequence
  source 1..20: mol_type = other DNA
gcctcagcctccccagcagc

SEQ ID NO: 1024 - DNA, 20 bp, synthetic construct
  misc_feature 1..20: note = Synthetic Sequence
  source 1..20: mol_type = other DNA
gccaaggtgggtggatcatg

SEQ ID NO: 1025 - DNA, 20 bp, synthetic construct
  misc_feature 1..20: note = Synthetic Sequence
  source 1..20: mol_type = other DNA
caggagaatcgtttgaacct

SEQ ID NO: 1026 - DNA, 20 bp, synthetic construct
  misc_feature 1..20: note = Synthetic Sequence
  source 1..20: mol_type = other DNA
agcatggctggggaggcctc

SEQ ID NO: 1027 - DNA, 20 bp, synthetic construct
  misc_feature 1..20: note = Synthetic Sequence
  source 1..20: mol_type = other DNA
agtgggattgctggatcaaa

SEQ ID NO: 1028 - DNA, 20 bp, synthetic construct
  misc_feature 1..20: note = Synthetic Sequence
  source 1..20: mol_type = other DNA
gagaatcacttgaatccggg

SEQ ID NO: 1029 - DNA, 20 bp, synthetic construct
  misc_feature 1..20: note = Synthetic Sequence
  source 1..20: mol_type = other DNA
gagatggggtttcaccacat

SEQ ID NO: 1030 - DNA, 20 bp, synthetic construct
  misc_feature 1..20: note = Synthetic Sequence
  source 1..20: mol_type = other DNA
gctgatggagctgaaagcca

SEQ ID NO: 1031 - DNA, 20 bp, synthetic construct
  misc_feature 1..20: note = Synthetic Sequence
  source 1..20: mol_type = other DNA
tttcaccgtgttaaccagga

SEQ ID NO: 1032 - DNA, 20 bp, synthetic construct
  misc_feature 1..20: note = Synthetic Sequence
  source 1..20: mol_type = other DNA
taagagattaaagtaaagac

SEQ ID NO: 1033 - DNA, 20 bp, synthetic construct
  misc_feature 1..20: note = Synthetic Sequence
  source 1..20: mol_type = other DNA
gctactcgggaggctgagga

SEQ ID NO: 1034 - DNA, 20 bp, synthetic construct
  misc_feature 1..20: note = Synthetic Sequence
  source 1..20: mol_type = other DNA
cgagaccatcctggttaaca

SEQ ID NO: 1035 - DNA, 20 bp, synthetic construct
  misc_feature 1..20: note = Synthetic Sequence
  source 1..20: mol_type = other DNA
caggagaatggcgtgaactc

SEQ ID NO: 1036 - DNA, 20 bp, synthetic construct
  misc_feature 1..20: note = Synthetic Sequence
  source 1..20: mol_type = other DNA
caaagtgggagcccaggcag

SEQ ID NO: 1037 - DNA, 20 bp, synthetic construct
  misc_feature 1..20: note = Synthetic Sequence
  source 1..20: mol_type = other DNA
ggtactcaggaggctgaggc

SEQ ID NO: 1038 - DNA, 20 bp, synthetic construct
  misc_feature 1..20: note = Synthetic Sequence
  source 1..20: mol_type = other DNA
ggcagccagagagaaaggtt

SEQ ID NO: 1039 - DNA, 20 bp, synthetic construct
  misc_feature 1..20: note = Synthetic Sequence
  source 1..20: mol_type = other DNA
gatacatgtgcagaacatgc

SEQ ID NO: 1040 - DNA, 20 bp, synthetic construct
  misc_feature 1..20: note = Synthetic Sequence
  source 1..20: mol_type = other DNA
cccagctgctggggaggctg

SEQ ID NO: 1041 - DNA, 20 bp, synthetic construct
  misc_feature 1..20: note = Synthetic Sequence
  source 1..20: mol_type = other DNA
cacaagaattgcttgaaccc

SEQ ID NO: 1042 - DNA, 20 bp, synthetic construct
  misc_feature 1..20: note = Synthetic Sequence
  source 1..20: mol_type = other DNA
atacaaaaaaaaaattagcc

SEQ ID NO: 1043 - DNA, 20 bp, synthetic construct
  misc_feature 1..20: note = Synthetic Sequence
  source 1..20: mol_type = other DNA
ttatccagtctatcactgat

SEQ ID NO: 1044 - DNA, 20 bp, synthetic construct
  misc_feature 1..20: note = Synthetic Sequence
  source 1..20: mol_type = other DNA
gctgaggcgggcagatcatg

SEQ ID NO: 1045 - DNA, 20 bp, synthetic construct
  misc_feature 1..20: note = Synthetic Sequence
  source 1..20: mol_type = other DNA
tacagattatttcatcaccc

SEQ ID NO: 1046 - DNA, 20 bp, synthetic construct
  misc_feature 1..20: note = Synthetic Sequence
  source 1..20: mol_type = other DNA
cagacggggtttcaccatgt

SEQ ID NO: 1047 - DNA, 20 bp, synthetic construct
  misc_feature 1..20: note = Synthetic Sequence
  source 1..20: mol_type = other DNA
gagaccacgaacccaccaga

SEQ ID NO: 1048 - DNA, 20 bp, synthetic construct
  misc_feature 1..20: note = Synthetic Sequence
  source 1..20: mol_type = other DNA
agaagaagacaggaaaatgt

SEQ ID NO: 1049 - DNA, 20 bp, synthetic construct
  misc_feature 1..20: note = Synthetic Sequence
  source 1..20: mol_type = other DNA
tatgttaagtgaaataagcc

SEQ ID NO: 1050 - DNA, 20 bp, synthetic construct
  misc_feature 1..20: note = Synthetic Sequence
  source 1..20: mol_type = other DNA
ctcttgaacctgggaggcag

SEQ ID NO: 1051 - DNA, 20 bp, synthetic construct
  misc_feature 1..20: note = Synthetic Sequence
  source 1..20: mol_type = other DNA
gagaattgcttgagcccagg

SEQ ID NO: 1052 - DNA, 20 bp, synthetic construct
  misc_feature 1..20: note = Synthetic Sequence
  source 1..20: mol_type = other DNA
aattataaaagtattaattt

SEQ ID NO: 1053 - DNA, 20 bp, synthetic construct
  misc_feature 1..20: note = Synthetic Sequence
  source 1..20: mol_type = other DNA
agagatgggtttcaccatgt

SEQ ID NO: 1054 - DNA, 20 bp, synthetic construct
  misc_feature 1..20: note = Synthetic Sequence
  source 1..20: mol_type = other DNA
attctgagcaaactatcaca

SEQ ID NO: 1055 - DNA, 20 bp, synthetic construct
  misc_feature 1..20: note = Synthetic Sequence
  source 1..20: mol_type = other DNA
gcacaagaattgcttgaacc

SEQ ID NO: 1056 - DNA, 20 bp, synthetic construct
  misc_feature 1..20: note = Synthetic Sequence
  source 1..20: mol_type = other DNA
gctgaggtgggcggatcatg

SEQ ID NO: 1057 - DNA, 20 bp, synthetic construct
  misc_feature 1..20: note = Synthetic Sequence
  source 1..20: mol_type = other DNA
gagaatcacttgaacctgga

SEQ ID NO: 1058 - DNA, 20 bp, synthetic construct
  misc_feature 1..20: note = Synthetic Sequence
  source 1..20: mol_type = other DNA
ctttgagaggccgaggcggg

SEQ ID NO: 1059 - DNA, 20 bp, synthetic construct
  misc_feature 1..20: note = Synthetic Sequence
  source 1..20: mol_type = other DNA
tactcaagcctcagcaatgg

SEQ ID NO: 1060 - DNA, 20 bp, synthetic construct
  misc_feature 1..20: note = Synthetic Sequence
  source 1..20: mol_type = other DNA
tttcaccctgttagccagga

SEQ ID NO: 1061 - DNA, 20 bp, synthetic construct
  misc_feature 1..20: note = Synthetic Sequence
  source 1..20: mol_type = other DNA
ggacaaatacctaatgcatg

SEQ ID NO: 1062 - DNA, 20 bp, synthetic construct
  misc_feature 1..20: note = Synthetic Sequence
  source 1..20: mol_type = other DNA
cgagaccatcctggctaacg

SEQ ID NO: 1063 - DNA, 20 bp, synthetic construct
  misc_feature 1..20: note = Synthetic Sequence
  source 1..20: mol_type = other DNA
gagaattgcttgaacttggg

SEQ ID NO: 1064 - DNA, 20 bp, synthetic construct
  misc_feature 1..20: note = Synthetic Sequence
  source 1..20: mol_type = other DNA
aggaaaattacagtcaaagg

SEQ ID NO: 1065 - DNA, 20 bp, synthetic construct
  misc_feature 1..20: note = Synthetic Sequence
  source 1..20: mol_type = other DNA
ataagtctcacaagatctga

SEQ ID NO: 1066 - DNA, 20 bp, synthetic construct
  misc_feature 1..20: note = Synthetic Sequence
  source 1..20: mol_type = other DNA
ggtgagtgttacagctctta

SEQ ID NO: 1067 - DNA, 20 bp, synthetic construct
  misc_feature 1..20: note = Synthetic Sequence
  source 1..20: mol_type = other DNA
gatactcaggaggctgaggc

SEQ ID NO: 1068 - DNA, 20 bp, synthetic construct
  misc_feature 1..20: note = Synthetic Sequence
  source 1..20: mol_type = other DNA
tgatagtttgctcagaatga

SEQ ID NO: 1069 - DNA, 20 bp, synthetic construct
  misc_feature 1..20: note = Synthetic Sequence
  source 1..20: mol_type = other DNA
cgagaccatcctgactaaca

SEQ ID NO: 1070 - DNA, 20 bp, synthetic construct
  misc_feature 1..20: note = Synthetic Sequence
  source 1..20: mol_type = other DNA
gatccagcaatcccactact

SEQ ID NO: 1071 - DNA, 20 bp, synthetic construct
  misc_feature 1..20: note = Synthetic Sequence
  source 1..20: mol_type = other DNA
tataggatttgggtaggtaa

SEQ ID NO: 1072 - DNA, 20 bp, synthetic construct
  misc_feature 1..20: note = Synthetic Sequence
  source 1..20: mol_type = other DNA
gggaggctaaggcaggagaa

SEQ ID NO: 1073 - DNA, 20 bp, synthetic construct
  misc_feature 1..20: note = Synthetic Sequence
  source 1..20: mol_type = other DNA
gctgaggcaggcagatcaca

SEQ ID NO: 1074 - DNA, 20 bp, synthetic construct
  misc_feature 1..20: note = Synthetic Sequence
  source 1..20: mol_type = other DNA
ctcttgaacccaggaggcag

SEQ ID NO: 1075 - DNA, 20 bp, synthetic construct
  misc_feature 1..20: note = Synthetic Sequence
  source 1..20: mol_type = other DNA
ctcaaatgatccacccacct

SEQ ID NO: 1076 - DNA, 20 bp, synthetic construct
  misc_feature 1..20: note = Synthetic Sequence
  source 1..20: mol_type = other DNA
taatgtaaatgacaagttaa

SEQ ID NO: 1077 - DNA, 20 bp, synthetic construct
  misc_feature 1..20: note = Synthetic Sequence
  source 1..20: mol_type = other DNA
caggagaatcacctgaaccc

SEQ ID NO: 1078 - DNA, 20 bp, synthetic construct
  misc_feature 1..20: note = Synthetic Sequence
  source 1..20: mol_type = other DNA
gagaatcgcttgaacctgag

SEQ ID NO: 1079 - DNA, 20 bp, synthetic construct
  misc_feature 1..20: note = Synthetic Sequence
  source 1..20: mol_type = other DNA
tgtatctagctgctctggtg

SEQ ID NO: 1080 - DNA, 20 bp, synthetic construct
  misc_feature 1..20: note = Synthetic Sequence
  source 1..20: mol_type = other DNA
ggctgaggcaggagaatggc

SEQ ID NO: 1081 - DNA, 20 bp, synthetic construct
  misc_feature 1..20: note = Synthetic Sequence
  source 1..20: mol_type = other DNA
gcaggagaatcacctgaacc

SEQ ID NO: 1082 - DNA, 20 bp, synthetic construct
  misc_feature 1..20: note = Synthetic Sequence
  source 1..20: mol_type = other DNA
cggggactgttgtggggtgg

SEQ ID NO: 1083 - DNA, 20 bp, synthetic construct
  misc_feature 1..20: note = Synthetic Sequence
  source 1..20: mol_type = other DNA
gcgggagaatggcgtgaacc

SEQ ID NO: 1084 - DNA, 20 bp, synthetic construct
  misc_feature 1..20: note = Synthetic Sequence
  source 1..20: mol_type = other DNA
gcctgtagtcccagctacac

SEQ ID NO: 1085 - DNA, 20 bp, synthetic construct
  misc_feature 1..20: note = Synthetic Sequence
  source 1..20: mol_type = other DNA
aatgtaaatgacaagttaat

SEQ ID NO: 1086 - DNA, 20 bp, synthetic construct
  misc_feature 1..20: note = Synthetic Sequence
  source 1..20: mol_type = other DNA
attaacttgtcatttacatt

SEQ ID NO: 1087 - DNA, 20 bp, synthetic construct
  misc_feature 1..20: note = Synthetic Sequence
  source 1..20: mol_type = other DNA
cctactcgggaggctgaggc

SEQ ID NO: 1088 - DNA, 20 bp, synthetic construct
  misc_feature 1..20: note = Synthetic Sequence
  source 1..20: mol_type = other DNA
tcacacaccggggactgttg

SEQ ID NO: 1089 - DNA, 20 bp, synthetic construct
  misc_feature 1..20: note = Synthetic Sequence
  source 1..20: mol_type = other DNA
caggaaaatgtgggaaagtt

SEQ ID NO: 1090 - DNA, 20 bp, synthetic construct
  misc_feature 1..20: note = Synthetic Sequence
  source 1..20: mol_type = other DNA
cagatggatcacctgaggtc

SEQ ID NO: 1091 - DNA, 20 bp, synthetic construct
  misc_feature 1..20: note = Synthetic Sequence
  source 1..20: mol_type = other DNA
caggagaattgcttaaaccc

SEQ ID NO: 1092 - DNA, 20 bp, synthetic construct
  misc_feature 1..20: note = Synthetic Sequence
  source 1..20: mol_type = other DNA
gagaatcgtttgaacccggg

SEQ ID NO: 1093 - DNA, 20 bp, synthetic construct
  misc_feature 1..20: note = Synthetic Sequence
  source 1..20: mol_type = other DNA
atcaacctgtcatctacatt

SEQ ID NO: 1094 - DNA, 20 bp, synthetic construct
  misc_feature 1..20: note = Synthetic Sequence
  source 1..20: mol_type = other DNA
caccagggcctgttgtgggg

SEQ ID NO: 1095 - DNA, 20 bp, synthetic construct
  misc_feature 1..20: note = Synthetic Sequence
  source 1..20: mol_type = other DNA
tgatccagcaatcccactac

SEQ ID NO: 1096 - DNA, 20 bp, synthetic construct
  misc_feature 1..20: note = Synthetic Sequence
  source 1..20: mol_type = other DNA
gccattgctgaggcttgagt

SEQ ID NO: 1097 - DNA, 20 bp, synthetic construct
  misc_feature 1..20: note = Synthetic Sequence
  source 1..20: mol_type = other DNA
caggagaatggcgtgaatcc

SEQ ID NO: 1098 - DNA, 20 bp, synthetic construct
  misc_feature 1..20: note = Synthetic Sequence
  source 1..20: mol_type = other DNA
ccggggactgttgtggggtg

SEQ ID NO: 1099 - DNA, 20 bp, synthetic construct
  misc_feature 1..20: note = Synthetic Sequence
  source 1..20: mol_type = other DNA
gcaggagaatggcgtgaatc

SEQ ID NO: 1100 - DNA, 20 bp, synthetic construct
  misc_feature 1..20: note = Synthetic Sequence
  source 1..20: mol_type = other DNA
aatgtagatgacaggttgat

SEQ ID NO: 1101 - DNA, 20 bp, synthetic construct
  misc_feature 1..20: note = Synthetic Sequence
  source 1..20: mol_type = other DNA
gatattagacctttgtcaga

SEQ ID NO: 1102 - DNA, 20 bp, synthetic construct
  misc_feature 1..20: note = Synthetic Sequence
  source 1..20: mol_type = other DNA
taatgtagatgacaggttga

SEQ ID NO: 1103 - DNA, 20 bp, synthetic construct
  misc_feature 1..20: note = Synthetic Sequence
  source 1..20: mol_type = other DNA
cacacaccggggactgttgt

SEQ ID NO: 1104 - DNA, 20 bp, synthetic construct
  misc_feature 1..20: note = Synthetic Sequence
  source 1..20: mol_type = other DNA
atgattcaattacctcccac

SEQ ID NO: 1105 - DNA, 20 bp, synthetic construct
  misc_feature 1..20: note = Synthetic Sequence
  source 1..20: mol_type = other DNA
gagaattgcttgaacctgga

SEQ ID NO: 1106 - DNA, 20 bp, synthetic construct
  misc_feature 1..20: note = Synthetic Sequence
  source 1..20: mol_type = other DNA
tctaccaatcagcaggatgt

SEQ ID NO: 1107 - DNA, 20 bp, synthetic construct
  misc_feature 1..20: note = Synthetic Sequence
  source 1..20: mol_type = other DNA
gcctcagcctcccgagtagg

SEQ ID NO: 1108 - DNA, 20 bp, synthetic construct
  misc_feature 1..20: note = Synthetic Sequence
  source 1..20: mol_type = other DNA
tctatcactgatgggcattt

SEQ ID NO: 1109 - DNA, 20 bp, synthetic construct
  misc_feature 1..20: note = Synthetic Sequence
  source 1..20: mol_type = other DNA
ctctaccaatcagcaggatg

SEQ ID NO: 1110 - DNA, 20 bp, synthetic construct
  misc_feature 1..20: note = Synthetic Sequence
  source 1..20: mol_type = other DNA
tacatgagtaagttctttag

SEQ ID NO: 1111 - DNA, 20 bp, synthetic construct
  misc_feature 1..20: note = Synthetic Sequence
  source 1..20: mol_type = other DNA
ataaagaactacctgagact

SEQ ID NO: 1112 - DNA, 20 bp, synthetic construct
  misc_feature 1..20: note = Synthetic Sequence
  source 1..20: mol_type = other DNA
gagaattgtttgaacctggg

SEQ ID NO: 1113 - DNA, 20 bp, synthetic construct
  misc_feature 1..20: note = Synthetic Sequence
  source 1..20: mol_type = other DNA
cgagaccattctggctaaca

SEQ ID NO: 1114 - DNA, 20 bp, synthetic construct
  misc_feature 1..20: note = Synthetic Sequence
  source 1..20: mol_type = other DNA
gagacagtgtttcaccatgt

SEQ ID NO: 1115 - DNA, 20 bp, synthetic construct
  misc_feature 1..20: note = Synthetic Sequence
  source 1..20: mol_type = other DNA
aatcacttgaatccaggagg

SEQ ID NO: 1116 - DNA, 20 bp, synthetic construct
  misc_feature 1..20: note = Synthetic Sequence
  source 1..20: mol_type = other DNA
gcacgagaattgcttgaacc

SEQ ID NO: 1117 - DNA, 20 bp, synthetic construct
  misc_feature 1..20: note = Synthetic Sequence
  source 1..20: mol_type = other DNA
ggggtcacaaggtgctcagt

SEQ ID NO: 1118 - DNA, 20 bp, synthetic construct
  misc_feature 1..20: note = Synthetic Sequence
  source 1..20: mol_type = other DNA
aggagaatggcgtgaacccc

SEQ ID NO: 1119 - DNA, 20 bp, synthetic construct
  misc_feature 1..20: note = Synthetic Sequence
  source 1..20: mol_type = other DNA
aggctgaggcaggagaatgg

SEQ ID NO: 1120 - DNA, 20 bp, synthetic construct
  misc_feature 1..20: note = Synthetic Sequence
  source 1..20: mol_type = other DNA
tcagatgagactttggactg

SEQ ID NO: 1121 - DNA, 20 bp, synthetic construct
  misc_feature 1..20: note = Synthetic Sequence
  source 1..20: mol_type = other DNA
acacaccggggactgttgtg

SEQ ID NO: 1122 - DNA, 20 bp, synthetic construct
  misc_feature 1..20: note = Synthetic Sequence
  source 1..20: mol_type = other DNA
cctacccaaatcctataaaa

SEQ ID NO: 1123 - DNA, 20 bp, synthetic construct
  misc_feature 1..20: note = Synthetic Sequence
  source 1..20: mol_type = other DNA
gcaggagaatcacttaaacc

SEQ ID NO: 1124 - DNA, 20 bp, synthetic construct
  misc_feature 1..20: note = Synthetic Sequence
  source 1..20: mol_type = other DNA
ggcgggaggatcacgaggtc

SEQ ID NO: 1125 - DNA, 20 bp, synthetic construct
  misc_feature 1..20: note = Synthetic Sequence
  source 1..20: mol_type = other DNA
agttacttcacttagaataa

SEQ ID NO: 1126 - DNA, 20 bp, synthetic construct
  misc_feature 1..20: note = Synthetic Sequence
  source 1..20: mol_type = other DNA
caggagaattgtttgaacct

SEQ ID NO: 1127 - DNA, 20 bp, synthetic construct
  misc_feature 1..20: note = Synthetic Sequence
  source 1..20: mol_type = other DNA
tataaagaactacctgagac

SEQ ID NO: 1128 - DNA, 20 bp, synthetic construct
  misc_feature 1..20: note = Synthetic Sequence
  source 1..20: mol_type = other DNA
gggaggttgaggcaggagaa

SEQ ID NO: 1129 - DNA, 20 bp, synthetic construct
  misc_feature 1..20: note = Synthetic Sequence
  source 1..20: mol_type = other DNA
caggaaaatcgcttgaacct

SEQ ID NO: 1130 - DNA, 20 bp, synthetic construct
  misc_feature 1..20: note = Synthetic Sequence
  source 1..20: mol_type = other DNA
acaggagaatggcgtgaacc

SEQ ID NO: 1131 - DNA, 20 bp, synthetic construct
  misc_feature 1..20: note = Synthetic Sequence
  source 1..20: mol_type = other DNA
aacttacaatcatggcagaa

SEQ ID NO: 1132 - DNA, 20 bp, synthetic construct
  misc_feature 1..20: note = Synthetic Sequence
  source 1..20: mol_type = other DNA
agaacaaagcttccacagtg

SEQ ID NO: 1133 - DNA, 20 bp, synthetic construct
  misc_feature 1..20: note = Synthetic Sequence
  source 1..20: mol_type = other DNA
attaaagtaaagacaggcat

SEQ ID NO: 1134 - DNA, 20 bp, synthetic construct
  misc_feature 1..20: note = Synthetic Sequence
  source 1..20: mol_type = other DNA
gccaaggcaggcggatcatg

SEQ ID NO: 1135 - DNA, 20 bp, synthetic construct
  misc_feature 1..20: note = Synthetic Sequence
  source 1..20: mol_type = other DNA
cagtgagaacacatggacac

SEQ ID NO: 1136 - DNA, 20 bp, synthetic construct
  misc_feature 1..20: note = Synthetic Sequence
  source 1..20: mol_type = other DNA
aaattataaaagtattaatt

SEQ ID NO: 1137 - DNA, 20 bp, synthetic construct
  misc_feature 1..20: note = Synthetic Sequence
  source 1..20: mol_type = other DNA
aagaatggcgtgaacccggg

SEQ ID NO: 1138 - DNA, 20 bp, synthetic construct
  misc_feature 1..20: note = Synthetic Sequence
  source 1..20: mol_type = other DNA
gactcagcccacctgcaccc

SEQ ID NO: 1139 - DNA, 20 bp, synthetic construct
  misc_feature 1..20: note = Synthetic Sequence
  source 1..20: mol_type = other DNA
agcttaatctctcccactct

SEQ ID NO: 1140 - DNA, 20 bp, synthetic construct
  misc_feature 1..20: note = Synthetic Sequence
  source 1..20: mol_type = other DNA
ggtacatgtgcaggatgtgc

SEQ ID NO: 1141 - DNA, 20 bp, synthetic construct
  misc_feature 1..20: note = Synthetic Sequence
  source 1..20: mol_type = other DNA
gagaatggcctgaacccggg

SEQ ID NO: 1142 - DNA, 20 bp, synthetic construct
  misc_feature 1..20: note = Synthetic Sequence
  source 1..20: mol_type = other DNA
gagacagggtttcaccatgc

SEQ ID NO: 1143 - DNA, 20 bp, synthetic construct
  misc_feature 1..20: note = Synthetic Sequence
  source 1..20: mol_type = other DNA
cgatagtttgctcagaatga

SEQ ID NO: 1144 - DNA, 20 bp, synthetic construct
  misc_feature 1..20: note = Synthetic Sequence
  source 1..20: mol_type = other DNA
ctgtatctagctgctctggt

SEQ ID NO: 1145 - DNA, 20 bp, synthetic construct
  misc_feature 1..20: note = Synthetic Sequence
  source 1..20: mol_type = other DNA
cacatggctggggaggcctc

SEQ ID NO: 1146 - DNA, 20 bp, synthetic construct
  misc_feature 1..20: note = Synthetic Sequence
  source 1..20: mol_type = other DNA
tcgggagatcgagaccatcc

SEQ ID NO: 1147 - DNA, 20 bp, synthetic construct
  misc_feature 1..20: note = Synthetic Sequence
  source 1..20: mol_type = other DNA
cacaagaatcacttgaacct

SEQ ID NO: 1148 - DNA, 20 bp, synthetic construct
  misc_feature 1..20: note = Synthetic Sequence
  source 1..20: mol_type = other DNA
caggagaatgacgtgaaccc

SEQ ID NO: 1149 - DNA, 20 bp, synthetic construct
  misc_feature 1..20: note = Synthetic Sequence
  source 1..20: mol_type = other DNA
tgtccagagtttcttccttc

SEQ ID NO: 1150 - DNA, 20 bp, synthetic construct
  misc_feature 1..20: note = Synthetic Sequence
  source 1..20: mol_type = other DNA
gcaggagaattgcttaaacc

SEQ ID NO: 1151 - DNA, 20 bp, synthetic construct
  misc_feature 1..20: note = Synthetic Sequence
  source 1..20: mol_type = other DNA
ctcaggtgatccacccatct

SEQ ID NO: 1152 - DNA, 20 bp, synthetic construct
  misc_feature 1..20: note = Synthetic Sequence
  source 1..20: mol_type = other DNA
ttccaatcaacagaaaaaga

SEQ ID NO: 1153 - DNA, 20 bp, synthetic construct
  misc_feature 1..20: note = Synthetic Sequence
  source 1..20: mol_type = other DNA
ggtactgggttcatctcact

SEQ ID NO: 1154 - DNA, 20 bp, synthetic construct
  misc_feature 1..20: note = Synthetic Sequence
  source 1..20: mol_type = other DNA
cggagtttcttccttctggt

SEQ ID NO: 1155 - DNA, 20 bp, synthetic construct
  misc_feature 1..20: note = Synthetic Sequence
  source 1..20: mol_type = other DNA
tgtagtcccagctacacggg

SEQ ID NO: 1156 - DNA, 20 bp, synthetic construct
  misc_feature 1..20: note = Synthetic Sequence
  source 1..20: mol_type = other DNA
attccaatcaacagaaaaag

SEQ ID NO: 1157 - DNA, 20 bp, synthetic construct
  misc_feature 1..20: note = Synthetic Sequence
  source 1..20: mol_type = other DNA
gagacagggtttcaccacat

SEQ ID NO: 1158 - DNA, 20 bp, synthetic construct
  misc_feature 1..20: note = Synthetic Sequence
  source 1..20: mol_type = other DNA
aatcacttgaacccaggaag

SEQ ID NO: 1159 - DNA, 20 bp, synthetic construct
  misc_feature 1..20: note = Synthetic Sequence
  source 1..20: mol_type = other DNA
aatcatttgaacccaggagg

SEQ ID NO: 1160 - DNA, 20 bp, synthetic construct
  misc_feature 1..20: note = Synthetic Sequence
  source 1..20: mol_type = other DNA
gtctatcactgatgggcatt

SEQ ID NO: 1161 - DNA, 20 bp, synthetic construct
  misc_feature 1..20: note = Synthetic Sequence
  source 1..20: mol_type = other DNA
caggagaatcacttaaaccc

SEQ ID NO: 1162 - DNA, 20 bp, synthetic construct
  misc_feature 1..20: note = Synthetic Sequence
  source 1..20: mol_type = other DNA
gcccatgcctgtgtcctgaa

SEQ ID NO: 1163 - DNA, 20 bp, synthetic construct
  misc_feature 1..20: note = Synthetic Sequence
  source 1..20: mol_type = other DNA
attataaaagtattaatttg

SEQ ID NO: 1164 - DNA, 20 bp, synthetic construct
  misc_feature 1..20: note = Synthetic Sequence
  source 1..20: mol_type = other DNA
tatcacatggggagaaacct

SEQ ID NO: 1165 - DNA, 20 bp, synthetic construct
  misc_feature 1..20: note = Synthetic Sequence
  source 1..20: mol_type = other DNA
ctcagatgatccacccacct

SEQ ID NO: 1166 - DNA, 20 bp, synthetic construct
  misc_feature 1..20: note = Synthetic Sequence
  source 1..20: mol_type = other DNA
tttcaccacgttagccagga

SEQ ID NO: 1167 - DNA, 20 bp, synthetic construct
  misc_feature 1..20: note = Synthetic Sequence
  source 1..20: mol_type = other DNA
gcaggagaatcactggaacc

SEQ ID NO: 1168 - DNA, 20 bp, synthetic construct
  misc_feature 1..20: note = Synthetic Sequence
  source 1..20: mol_type = other DNA
gagaattgcttgaacctgag

SEQ ID NO: 1169 - DNA, 20 bp, synthetic construct
  misc_feature 1..20: note = Synthetic Sequence
  source 1..20: mol_type = other DNA
gagaatcatttgaacccggg

SEQ ID NO: 1170 - DNA, 20 bp, synthetic construct
  misc_feature 1..20: note = Synthetic Sequence
  source 1..20: mol_type = other DNA
tgttggaggtggggcctggt

SEQ ID NO: 1171 - DNA, 20 bp, synthetic construct
  misc_feature 1..20: note = Synthetic Sequence
  source 1..20: mol_type = other DNA
acataggtatacacatgcca

SEQ ID NO: 1172 - DNA, 20 bp, synthetic construct
  misc_feature 1..20: note = Synthetic Sequence
  source 1..20: mol_type = other DNA
tcaggagatcgaggccatcc

SEQ ID NO: 1173 - DNA, 20 bp, synthetic construct
  misc_feature 1..20: note = Synthetic Sequence
  source 1..20: mol_type = other DNA
ggtaattgaatcatgggggc

SEQ ID NO: 1174 - DNA, 20 bp, synthetic construct
  misc_feature 1..20: note = Synthetic Sequence
  source 1..20: mol_type = other DNA
aattagccgggcgcagtggc

SEQ ID NO: 1175 - DNA, 20 bp, synthetic construct
  misc_feature 1..20: note = Synthetic Sequence
  source 1..20: mol_type = other DNA
gtcaaagatcagatagttgt

SEQ ID NO: 1176 - DNA, 20 bp, synthetic construct
  misc_feature 1..20: note = Synthetic Sequence
  source 1..20: mol_type = other DNA
caagtcacatcttacatgga

SEQ ID NO: 1177 - DNA, 20 bp, synthetic construct
  misc_feature 1..20: note = Synthetic Sequence
  source 1..20: mol_type = other DNA
cgggcagatcacttgaggcc

SEQ ID NO: 1178 - DNA, 20 bp, synthetic construct
  misc_feature 1..20: note = Synthetic Sequence
  source 1..20: mol_type = other DNA
taggtatacacatgccatgg

SEQ ID NO: 1179 - DNA, 20 bp, synthetic construct
  misc_feature 1..20: note = Synthetic Sequence
  source 1..20: mol_type = other DNA
tctgtatctagctgctctgg

SEQ ID NO: 1180 - DNA, 20 bp, synthetic construct
  misc_feature 1..20: note = Synthetic Sequence
  source 1..20: mol_type = other DNA
ggccagagttccaggggctc

SEQ ID NO: 1181 - DNA, 20 bp, synthetic construct
  misc_feature 1..20: note = Synthetic Sequence
  source 1..20: mol_type = other DNA
aatcacttgaacctaggagg

SEQ ID NO: 1182 - DNA, 20 bp, synthetic construct
  misc_feature 1..20: note = Synthetic Sequence
  source 1..20: mol_type = other DNA
ctggggaagcctcacaatca

SEQ ID NO: 1183 - DNA, 20 bp, synthetic construct
  misc_feature 1..20: note = Synthetic Sequence
  source 1..20: mol_type = other DNA
cacgagaatcacttgaacct

SEQ ID NO: 1184 - DNA, 20 bp, synthetic construct
  misc_feature 1..20: note = Synthetic Sequence
  source 1..20: mol_type = other DNA
gagaattgtttgaacccagg

SEQ ID NO: 1185 - DNA, 20 bp, synthetic construct
  misc_feature 1..20: note = Synthetic Sequence
  source 1..20: mol_type = other DNA
caatcatggcagaaggtgaa

SEQ ID NO: 1186 - DNA, 20 bp, synthetic construct
  misc_feature 1..20: note = Synthetic Sequence
  source 1..20: mol_type = other DNA
cagatcacgaggtcaggaga

SEQ ID NO: 1187 - DNA, 20 bp, synthetic construct
  misc_feature 1..20: note = Synthetic Sequence
  source 1..20: mol_type = other DNA
gcaggagaacggcgtgaacc

SEQ ID NO: 1188 - DNA, 20 bp, synthetic construct
  misc_feature 1..20: note = Synthetic Sequence
  source 1..20: mol_type = other DNA
agaccagagctgttcctatt

SEQ ID NO: 1189 - DNA, 20 bp, synthetic construct
  misc_feature 1..20: note = Synthetic Sequence
  source 1..20: mol_type = other DNA
caggagaacggcgtgaaccc

SEQ ID NO: 1190 - DNA, 20 bp, synthetic construct
  misc_feature 1..20: note = Synthetic Sequence
  source 1..20: mol_type = other DNA
ctggggaggcctcagaatca

SEQ ID NO: 1191 - DNA, 20 bp, synthetic construct
  misc_feature 1..20: note = Synthetic Sequence
  source 1..20: mol_type = other DNA
aatcacttgaaccctggagg

SEQ ID NO: 1192 - DNA, 20 bp, synthetic construct
  misc_feature 1..20: note = Synthetic Sequence
  source 1..20: mol_type = other DNA
ctcaggtgatccaccagcct

SEQ ID NO: 1193 - DNA, 20 bp, synthetic construct
  misc_feature 1..20: note = Synthetic Sequence
  source 1..20: mol_type = other DNA
cacaatcatggtggaaggca

SEQ ID NO: 1194 - DNA, 20 bp, synthetic construct
  misc_feature 1..20: note = Synthetic Sequence
  source 1..20: mol_type = other DNA
gctacttgggagtctgaggc

SEQ ID NO: 1195 - DNA, 20 bp, synthetic construct
  misc_feature 1..20: note = Synthetic Sequence
  source 1..20: mol_type = other DNA
gctactcggggggctgaggc

SEQ ID NO: 1196 - DNA, 20 bp, synthetic construct
  misc_feature 1..20: note = Synthetic Sequence
  source 1..20: mol_type = other DNA
gctactcgggagcctgaggc

SEQ ID NO: 1197 - DNA, 20 bp, synthetic construct
  misc_feature 1..20: note = Synthetic Sequence
  source 1..20: mol_type = other DNA
aaaaaattagccgggcgcag

SEQ ID NO: 1198 - DNA, 20 bp, synthetic construct
  misc_feature 1..20: note = Synthetic Sequence
  source 1..20: mol_type = other DNA
aagatcaaaaaagacaaaga

SEQ ID NO: 1199 - DNA, 20 bp, synthetic construct
  misc_feature 1..20: note = Synthetic Sequence
  source 1..20: mol_type = other DNA
aatagcttgaacccaggagg

SEQ ID NO: 1200 - DNA, 20 bp, synthetic construct
  misc_feature 1..20: note = Synthetic Sequence
  source 1..20: mol_type = other DNA
gccagtggatcttagcttgc

SEQ ID NO: 1201 - DNA, 20 bp, synthetic construct
  misc_feature 1..20: note = Synthetic Sequence
  source 1..20: mol_type = other DNA
acttacaatcatggcagaag

SEQ ID NO: 1202 - DNA, 20 bp, synthetic construct
  misc_feature 1..20: note = Synthetic Sequence
  source 1..20: mol_type = other DNA
acaaggctgtttatttcacc

SEQ ID NO: 1203 - DNA, 20 bp, synthetic construct
  misc_feature 1..20: note = Synthetic Sequence
  source 1..20: mol_type = other DNA
tcggagtttcttccttctgg

SEQ ID NO: 1204 - DNA, 20 bp, synthetic construct
  misc_feature 1..20: note = Synthetic Sequence
  source 1..20: mol_type = other DNA
tacaaaagaaagaggtttaa

SEQ ID NO: 1205 - DNA, 20 bp, synthetic construct
  misc_feature 1..20: note = Synthetic Sequence
  source 1..20: mol_type = other DNA
aatgtgaggacatgagattt

SEQ ID NO: 1206 - DNA, 20 bp, synthetic construct
  misc_feature 1..20: note = Synthetic Sequence
  source 1..20: mol_type = other DNA
gcaagagaatggcgtgaacc

SEQ ID NO: 1207 - DNA, 20 bp, synthetic construct
  misc_feature 1..20: note = Synthetic Sequence
  source 1..20: mol_type = other DNA
gagacagggtttcaccattt

SEQ ID NO: 1208 - DNA, 20 bp, synthetic construct
  misc_feature 1..20: note = Synthetic Sequence
  source 1..20: mol_type = other DNA
cccagcaagctaagatccac

SEQ ID NO: 1209 - DNA, 20 bp, synthetic construct
  misc_feature 1..20: note = Synthetic Sequence
  source 1..20: mol_type = other DNA
ctcttgaacccaggaggtgg

SEQ ID NO: 1210 - DNA, 20 bp, synthetic construct
  misc_feature 1..20: note = Synthetic Sequence
  source 1..20: mol_type = other DNA
aatcacttgaacccgggaga

SEQ ID NO: 1211 - DNA, 20 bp, synthetic construct
  misc_feature 1..20: note = Synthetic Sequence
  source 1..20: mol_type = other DNA
gaaaatcacttgaacctggg

SEQ ID NO: 1212 - DNA, 20 bp, synthetic construct
  misc_feature 1..20: note = Synthetic Sequence
  source 1..20: mol_type = other DNA
tcccagagcccctggaactc

SEQ ID NO: 1213 - DNA, 20 bp, synthetic construct
  misc_feature 1..20: note = Synthetic Sequence
  source 1..20: mol_type = other DNA
tgcttgaaccagggaggtgg

SEQ ID NO: 1214 - DNA, 20 bp, synthetic construct
  misc_feature 1..20: note = Synthetic Sequence
  source 1..20: mol_type = other DNA
agttccaggggctctgggag

SEQ ID NO: 1215 - DNA, 20 bp, synthetic construct
  misc_feature 1..20: note = Synthetic Sequence
  source 1..20: mol_type = other DNA
aaattagccgggcgcagtgg

SEQ ID NO: 1216 - DNA, 20 bp, synthetic construct
  misc_feature 1..20: note = Synthetic Sequence
  source 1..20: mol_type = other DNA
aatatggcacatatacacca

SEQ ID NO: 1217 - DNA, 20 bp, synthetic construct
  misc_feature 1..20: note = Synthetic Sequence
  source 1..20: mol_type = other DNA
aatacccacaacagttatgg

SEQ ID NO: 1218 - DNA, 20 bp, synthetic construct
  misc_feature 1..20: note = Synthetic Sequence
  source 1..20: mol_type = other DNA
gagaattacttgaacctggg

SEQ ID NO: 1219 - DNA, 20 bp, synthetic construct
  misc_feature 1..20: note = Synthetic Sequence
  source 1..20: mol_type = other DNA
atactaaccttaaatgtaaa

SEQ ID NO: 1220 - DNA, 20 bp, synthetic construct
  misc_feature 1..20: note = Synthetic Sequence
  source 1..20: mol_type = other DNA
aatcatggtggaaggcaagg

SEQ ID NO: 1221 - DNA, 20 bp, synthetic construct
  misc_feature 1..20: note = Synthetic Sequence
  source 1..20: mol_type = other DNA
caaattcaaaagctagcaga

SEQ ID NO: 1222 - DNA, 20 bp, synthetic construct
  misc_feature 1..20: note = Synthetic Sequence
  source 1..20: mol_type = other DNA
aacctagatgatgggttgat

SEQ ID NO: 1223 - DNA, 20 bp, synthetic construct
  misc_feature 1..20: note = Synthetic Sequence
  source 1..20: mol_type = other DNA
agtgggaggtaattgaatca

SEQ ID NO: 1224 - DNA, 20 bp, synthetic construct
  misc_feature 1..20: note = Synthetic Sequence
  source 1..20: mol_type = other DNA
agatcaaaaaagacaaagaa

SEQ ID NO: 1225 - DNA, 20 bp, synthetic construct
  misc_feature 1..20: note = Synthetic Sequence
  source 1..20: mol_type = other DNA
tcaggagatcgagaccgtcc

SEQ ID NO: 1226 - DNA, 20 bp, synthetic construct
  misc_feature 1..20: note = Synthetic Sequence
  source 1..20: mol_type = other DNA
gccagagttccaggggctct

SEQ ID NO: 1227 - DNA, 20 bp, synthetic construct
  misc_feature 1..20: note = Synthetic Sequence
  source 1..20: mol_type = other DNA
tcctcaagtgccgccaaagt

SEQ ID NO: 1228 - DNA, 20 bp, synthetic construct
  misc_feature 1..20: note = Synthetic Sequence
  source 1..20: mol_type = other DNA
ggaagaaaaagaggtttaat

SEQ ID NO: 1229 - DNA, 20 bp, synthetic construct
  misc_feature 1..20: note = Synthetic Sequence
  source 1..20: mol_type = other DNA
ggagcaagtcacatcttaca

SEQ ID NO: 1230 - DNA, 20 bp, synthetic construct
  misc_feature 1..20: note = Synthetic Sequence
  source 1..20: mol_type = other DNA
aatcacttgaacccagaagg

SEQ ID NO: 1231 - DNA, 20 bp, synthetic construct
  misc_feature 1..20: note = Synthetic Sequence
  source 1..20: mol_type = other DNA
caaagcttccacagtgtgga

SEQ ID NO: 1232 - DNA, 20 bp, synthetic construct
  misc_feature 1..20: note = Synthetic Sequence
  source 1..20: mol_type = other DNA
gagaaaccttggacaatacc

SEQ ID NO: 1233 - DNA, 20 bp, synthetic construct
  misc_feature 1..20: note = Synthetic Sequence
  source 1..20: mol_type = other DNA
agagacaggtttcaccatgt

SEQ ID NO: 1234 - DNA, 20 bp, synthetic construct
  misc_feature 1..20: note = Synthetic Sequence
  source 1..20: mol_type = other DNA
tactcacaatagcaaagact

SEQ ID NO: 1235 - DNA, 20 bp, synthetic construct
  misc_feature 1..20: note = Synthetic Sequence
  source 1..20: mol_type = other DNA
caggagaatcgcttgaaccg

SEQ ID NO: 1236 - DNA, 20 bp, synthetic construct
  misc_feature 1..20: note = Synthetic Sequence
  source 1..20: mol_type = other DNA
ggaaagccaggtattgtcca

SEQ ID NO: 1237 - DNA, 20 bp, synthetic construct
  misc_feature 1..20: note = Synthetic Sequence
  source 1..20: mol_type = other DNA
gagatggggcttcaccatgt

SEQ ID NO: 1238 - DNA, 20 bp, synthetic construct
  misc_feature 1..20: note = Synthetic Sequence
  source 1..20: mol_type = other DNA
tataaaggaaagaggtttaa

SEQ ID NO: 1239 - DNA, 20 bp, synthetic construct
  misc_feature 1..20: note = Synthetic Sequence
  source 1..20: mol_type = other DNA
ctcttgaacctgggaggtgg

SEQ ID NO: 1240 - DNA, 20 bp, synthetic construct
  misc_feature 1..20: note = Synthetic Sequence
  source 1..20: mol_type = other DNA
gagaattgcttgaacccgag

SEQ ID NO: 1241 - DNA, 20 bp, synthetic construct
  misc_feature 1..20: note = Synthetic Sequence
  source 1..20: mol_type = other DNA
gggcttaaaacctagatgat

SEQ ID NO: 1242 - DNA, 20 bp, synthetic construct
  misc_feature 1..20: note = Synthetic Sequence
  source 1..20: mol_type = other DNA
gcagccactcccagagcccc

SEQ ID NO: 1243 - DNA, 20 bp, synthetic construct
  misc_feature 1..20: note = Synthetic Sequence
  source 1..20: mol_type = other DNA
aggaggctgaggcagaagaa

SEQ ID NO: 1244 - DNA, 20 bp, synthetic construct
  misc_feature 1..20: note = Synthetic Sequence
  source 1..20: mol_type = other DNA
tactaaccttaaatgtaaat

SEQ ID NO: 1245 - DNA, 20 bp, synthetic construct
  misc_feature 1..20: note = Synthetic Sequence
  source 1..20: mol_type = other DNA
caaaaattagcctggtgtgg

SEQ ID NO: 1246 - DNA, 20 bp, synthetic construct
  misc_feature 1..20: note = Synthetic Sequence
  source 1..20: mol_type = other DNA
gacacagggtttcaccatgt

SEQ ID NO: 1247 - DNA, 20 bp, synthetic construct
  misc_feature 1..20: note = Synthetic Sequence
  source 1..20: mol_type = other DNA
aaaacaaccccattaaaaag

SEQ ID NO: 1248 - DNA, 20 bp, synthetic construct
  misc_feature 1..20: note = Synthetic Sequence
  source 1..20: mol_type = other DNA
tgattcaattacctcccact

SEQ ID NO: 1249 - DNA, 20 bp, synthetic construct
  misc_feature 1..20: note = Synthetic Sequence
  source 1..20: mol_type = other DNA
tcagcagatcgagaccatcc

SEQ ID NO: 1250 - DNA, 20 bp, synthetic construct
  misc_feature 1..20: note = Synthetic Sequence
  source 1..20: mol_type = other DNA
tcactgatgggcatttgggt

SEQ ID NO: 1251 - DNA, 20 bp, synthetic construct
  misc_feature 1..20: note = Synthetic Sequence
  source 1..20: mol_type = other DNA
caggagaattgcctgaaccc

SEQ ID NO: 1252 - DNA, 20 bp, synthetic construct
  misc_feature 1..20: note = Synthetic Sequence
  source 1..20: mol_type = other DNA
tgcttgaatccaggaggcag

SEQ ID NO: 1253 - DNA, 20 bp, synthetic construct
  misc_feature 1..20: note = Synthetic Sequence
  source 1..20: mol_type = other DNA
taattatactttaagttcta

SEQ ID NO: 1254 - DNA, 20 bp, synthetic construct
  misc_feature 1..20: note = Synthetic Sequence
  source 1..20: mol_type = other DNA
cacgagaattgcttgaacct

SEQ ID NO: 1255 - DNA, 20 bp, synthetic construct
  misc_feature 1..20: note = Synthetic Sequence
  source 1..20: mol_type = other DNA
tatttcacctgggtgcaggt

SEQ ID NO: 1256 - DNA, 20 bp, synthetic construct
  misc_feature 1..20: note = Synthetic Sequence
  source 1..20: mol_type = other DNA
aacttacaatcatggtggaa

SEQ ID NO: 1257 - DNA, 20 bp, synthetic construct
  misc_feature 1..20: note = Synthetic Sequence
  source 1..20: mol_type = other DNA
ggacaatacctggctttcct

SEQ ID NO: 1258 - DNA, 20 bp, synthetic construct
  misc_feature 1..20: note = Synthetic Sequence
  source 1..20: mol_type = other DNA
cgagaccagcctgcccaaca

SEQ ID NO: 1259 - DNA, 20 bp, synthetic construct
  misc_feature 1..20: note = Synthetic Sequence
  source 1..20: mol_type = other DNA
gcaggagaatggagtgaacc

SEQ ID NO: 1260 - DNA, 20 bp, synthetic construct
  misc_feature 1..20: note = Synthetic Sequence
  source 1..20: mol_type = other DNA
taggagaattgcttgaacct

SEQ ID NO: 1261 - DNA, 20 bp, synthetic construct
  misc_feature 1..20: note = Synthetic Sequence
  source 1..20: mol_type = other DNA
gacacggggtttcaccatgt

SEQ ID NO: 1262 - DNA, 20 bp, synthetic construct
  misc_feature 1..20: note = Synthetic Sequence
  source 1..20: mol_type = other DNA
caggagaatggagtgaaccc

SEQ ID NO: 1263 - DNA, 20 bp, synthetic construct
  misc_feature 1..20: note = Synthetic Sequence
  source 1..20: mol_type = other DNA
gctactcggcaggctgaggc

SEQ ID NO: 1264 - DNA, 20 bp, synthetic construct
  misc_feature 1..20: note = Synthetic Sequence
  source 1..20: mol_type = other DNA
gtggaagtgactttggaact

SEQ ID NO: 1265 - DNA, 20 bp, synthetic construct
  misc_feature 1..20: note = Synthetic Sequence
  source 1..20: mol_type = other DNA
gtggaagcaactttggaact

SEQ ID NO: 1266 - DNA, 20 bp, synthetic construct
  misc_feature 1..20: note = Synthetic Sequence
  source 1..20: mol_type = other DNA
caggcacacaccaccacgcc

SEQ ID NO: 1267 - DNA, 20 bp, synthetic construct
  misc_feature 1..20: note = Synthetic Sequence
  source 1..20: mol_type = other DNA
tgtggaagcaactttggaac

SEQ ID NO: 1268 - DNA, 20 bp, synthetic construct
  misc_feature 1..20: note = Synthetic Sequence
  source 1..20: mol_type = other DNA
tgtggaagtgactttggaac

SEQ ID NO: 1269 - DNA, 20 bp, synthetic construct
  misc_feature 1..20: note = Synthetic Sequence
  source 1..20: mol_type = other DNA
ctcttgaacctgggaggcgg

SEQ ID NO: 1270 - DNA, 20 bp, synthetic construct
  misc_feature 1..20: note = Synthetic Sequence
  source 1..20: mol_type = other DNA
tttggatatatacccagtaa

SEQ ID NO: 1271 - DNA, 20 bp, synthetic construct
  misc_feature 1..20: note = Synthetic Sequence
  source 1..20: mol_type = other DNA
gcaggagaattgctggaacc

SEQ ID NO: 1272 - DNA, 20 bp, synthetic construct
  misc_feature 1..20: note = Synthetic Sequence
  source 1..20: mol_type = other DNA
acaatcatggcagaaggcaa

SEQ ID NO: 1273 - DNA, 20 bp, synthetic construct
  misc_feature 1..20: note = Synthetic Sequence
  source 1..20: mol_type = other DNA
tcactaccatgagaacagta

SEQ ID NO: 1274 - DNA, 20 bp, synthetic construct
  misc_feature 1..20: note = Synthetic Sequence
  source 1..20: mol_type = other DNA
ttggatatatacccagtaat

SEQ ID NO: 1275 - DNA, 20 bp, synthetic construct
  misc_feature 1..20: note = Synthetic Sequence
  source 1..20: mol_type = other DNA
ctttatcagcagcatgaaaa

SEQ ID NO: 1276 - DNA, 20 bp, synthetic construct
  misc_feature 1..20: note = Synthetic Sequence
  source 1..20: mol_type = other DNA
gacaaatacctaatgcatgt

SEQ ID NO: 1277 - DNA, 20 bp, synthetic construct
  misc_feature 1..20: note = Synthetic Sequence
  source 1..20: mol_type = other DNA
gacaggcataggaaatcaca

SEQ ID NO: 1278 - DNA, 20 bp, synthetic construct
  misc_feature 1..20: note = Synthetic Sequence
  source 1..20: mol_type = other DNA
caggaaaattgcttgaacct

SEQ ID NO: 1279 - DNA, 20 bp, synthetic construct
  misc_feature 1..20: note = Synthetic Sequence
  source 1..20: mol_type = other DNA
aaattatactttaagttcta

SEQ ID NO: 1280 - DNA, 20 bp, synthetic construct
  misc_feature 1..20: note = Synthetic Sequence
  source 1..20: mol_type = other DNA
tttcaccgtgttagccggga

SEQ ID NO: 1281 - DNA, 20 bp, synthetic construct
  misc_feature 1..20: note = Synthetic Sequence
  source 1..20: mol_type = other DNA
cacctgaggtcaggagttcg

SEQ ID NO: 1282 - DNA, 20 bp, synthetic construct
  misc_feature 1..20: note = Synthetic Sequence
  source 1..20: mol_type = other DNA
cgagaccatcccggctaaca

SEQ ID NO: 1283 - DNA, 20 bp, synthetic construct
  misc_feature 1..20: note = Synthetic Sequence
  source 1..20: mol_type = other DNA
gtcaatacccacaacagtta

SEQ ID NO: 1284 - DNA, 20 bp, synthetic construct
  misc_feature 1..20: note = Synthetic Sequence
  source 1..20: mol_type = other DNA
cgcttgaacctgggaggtag

SEQ ID NO: 1285 - DNA, 20 bp, synthetic construct
  misc_feature 1..20: note = Synthetic Sequence
  source 1..20: mol_type = other DNA
tttaagttccttatagattc

SEQ ID NO: 1286 - DNA, 20 bp, synthetic construct
  misc_feature 1..20: note = Synthetic Sequence
  source 1..20: mol_type = other DNA
cgcttgaacccaggagacag

SEQ ID NO: 1287 - DNA, 20 bp, synthetic construct
  misc_feature 1..20: note = Synthetic Sequence
  source 1..20: mol_type = other DNA
cactaccatgagaacagtat

SEQ ID NO: 1288 - DNA, 20 bp, synthetic construct
  misc_feature 1..20: note = Synthetic Sequence
  source 1..20: mol_type = other DNA
cacctatcaacccatcatct

SEQ ID NO: 1289 - DNA, 20 bp, synthetic construct
  misc_feature 1..20: note = Synthetic Sequence
  source 1..20: mol_type = other DNA
gccgaggagggcggatcacg

SEQ ID NO: 1290 - DNA, 20 bp, synthetic construct
  misc_feature 1..20: note = Synthetic Sequence
  source 1..20: mol_type = other DNA
gctacgcgggaggctgaggc

SEQ ID NO: 1291 - DNA, 20 bp, synthetic construct
  misc_feature 1..20: note = Synthetic Sequence
  source 1..20: mol_type = other DNA
gagaatcacctgaacccagg

SEQ ID NO: 1292 - DNA, 20 bp, synthetic construct
  misc_feature 1..20: note = Synthetic Sequence
  source 1..20: mol_type = other DNA
cgcttgaacccaggaagcag

SEQ ID NO: 1293 - DNA, 20 bp, synthetic construct
  misc_feature 1..20: note = Synthetic Sequence
  source 1..20: mol_type = other DNA
cgcttgaacccaggaggtag

SEQ ID NO: 1294 - DNA, 20 bp, synthetic construct
  misc_feature 1..20: note = Synthetic Sequence
  source 1..20: mol_type = other DNA
agaacacttggacacagggc

SEQ ID NO: 1295 - DNA, 20 bp, synthetic construct
  misc_feature 1..20: note = Synthetic Sequence
  source 1..20: mol_type = other DNA
acaaatacctaatgcatgtg

SEQ ID NO: 1296 - DNA, 20 bp, synthetic construct
  misc_feature 1..20: note = Synthetic Sequence
  source 1..20: mol_type = other DNA
agagtcagcgaagggagata

SEQ ID NO: 1297 - DNA, 20 bp, synthetic construct
  misc_feature 1..20: note = Synthetic Sequence
  source 1..20: mol_type = other DNA
taatgtaaatgacgagttga

SEQ ID NO: 1298 - DNA, 20 bp, synthetic construct
  misc_feature 1..20: note = Synthetic Sequence
  source 1..20: mol_type = other DNA
cacttgaacccaggaggtag

SEQ ID NO: 1299 - DNA, 20 bp, synthetic construct
  misc_feature 1..20: note = Synthetic Sequence
  source 1..20: mol_type = other DNA
ctcaggtgatccactcacct

SEQ ID NO: 1300 - DNA, 20 bp, synthetic construct
  misc_feature 1..20: note = Synthetic Sequence
  source 1..20: mol_type = other DNA
acttacaatcatggtggaag

SEQ ID NO: 1301 - DNA, 20 bp, synthetic construct
  misc_feature 1..20: note = Synthetic Sequence
  source 1..20: mol_type = other DNA
gaaaatcgcttgaacccggg

SEQ ID NO: 1302 - DNA, 20 bp, synthetic construct
  misc_feature 1..20: note = Synthetic Sequence
  source 1..20: mol_type = other DNA
cacttgaacccaggagacag

SEQ ID NO: 1303 - DNA, 20 bp, synthetic construct
  misc_feature 1..20: note = Synthetic Sequence
  source 1..20: mol_type = other DNA
tgaatgcatcccagagattc

SEQ ID NO: 1304 - DNA, 20 bp, synthetic construct
  misc_feature 1..20: note = Synthetic Sequence
  source 1..20: mol_type = other DNA
aattagccaggcgcggtggc

SEQ ID NO: 1305 - DNA, 20 bp, synthetic construct
  misc_feature 1..20: note = Synthetic Sequence
  source 1..20: mol_type = other DNA
cacttgaatctgggaggcag

SEQ ID NO: 1306 - DNA, 20 bp, synthetic construct
  misc_feature 1..20: note = Synthetic Sequence
  source 1..20: mol_type = other DNA
cgcttgaacctaggaggcag

SEQ ID NO: 1307 - DNA, 20 bp, synthetic construct
  misc_feature 1..20: note = Synthetic Sequence
  source 1..20: mol_type = other DNA
acaggcataggaaatcacaa

SEQ ID NO: 1308 - DNA, 20 bp, synthetic construct
  misc_feature 1..20: note = Synthetic Sequence
  source 1..20: mol_type = other DNA
caaaaattagttgggtgtgg

SEQ ID NO: 1309 - DNA, 20 bp, synthetic construct
  misc_feature 1..20: note = Synthetic Sequence
  source 1..20: mol_type = other DNA
aatgtaaatgacgagttgat

SEQ ID NO: 1310 - DNA, 20 bp, synthetic construct
  misc_feature 1..20: note = Synthetic Sequence
  source 1..20: mol_type = other DNA
taaaaatacaaaacattagc

SEQ ID NO: 1311 - DNA, 20 bp, synthetic construct
  misc_feature 1..20: note = Synthetic Sequence
  source 1..20: mol_type = other DNA
caggagaatggcgggaaccc

SEQ ID NO: 1312 - DNA, 20 bp, synthetic construct
  misc_feature 1..20: note = Synthetic Sequence
  source 1..20: mol_type = other DNA
actaccatgagaacagtatg

SEQ ID NO: 1313 - DNA, 20 bp, synthetic construct
  misc_feature 1..20: note = Synthetic Sequence
  source 1..20: mol_type = other DNA
cacttgaacctaggaggcag

SEQ ID NO: 1314 - DNA, 20 bp, synthetic construct
  misc_feature 1..20: note = Synthetic Sequence
  source 1..20: mol_type = other DNA
aatcacttgaacctggaagg

SEQ ID NO: 1315 - DNA, 20 bp, synthetic construct
  misc_feature 1..20: note = Synthetic Sequence
  source 1..20: mol_type = other DNA
tcagagattgcagtaaagac

SEQ ID NO: 1316 - DNA, 20 bp, synthetic construct
  misc_feature 1..20: note = Synthetic Sequence
  source 1..20: mol_type = other DNA
aaaaataactaatgggtact

SEQ ID NO: 1317 - DNA, 20 bp, synthetic construct
  misc_feature 1..20: note = Synthetic Sequence
  source 1..20: mol_type = other DNA
aggaaaactaacaaccagaa

SEQ ID NO: 1318 - DNA, 20 bp, synthetic construct
  misc_feature 1..20: note = Synthetic Sequence
  source 1..20: mol_type = other DNA
gagaacggcgtgaacccggg

SEQ ID NO: 1319 - DNA, 20 bp, synthetic construct
  misc_feature 1..20: note = Synthetic Sequence
  source 1..20: mol_type = other DNA
gtgaggacatgagatttggg

SEQ ID NO: 1320 - DNA, 20 bp, synthetic construct
  misc_feature 1..20: note = Synthetic Sequence
  source 1..20: mol_type = other DNA
tattcacaacagcaaagact

SEQ ID NO: 1321 - DNA, 20 bp, synthetic construct
  misc_feature 1..20: note = Synthetic Sequence
  source 1..20: mol_type = other DNA
gccgaggcgggaggatcacg

SEQ ID NO: 1322 - DNA, 20 bp, synthetic construct
  misc_feature 1..20: note = Synthetic Sequence
  source 1..20: mol_type = other DNA
ttgggagggtgtatgtgtca

SEQ ID NO: 1323 - DNA, 20 bp, synthetic construct
  misc_feature 1..20: note = Synthetic Sequence
  source 1..20: mol_type = other DNA
cgcttgaacccaggagatgg

SEQ ID NO: 1324 - DNA, 20 bp, synthetic construct
  misc_feature 1..20: note = Synthetic Sequence
  source 1..20: mol_type = other DNA
gcaggaggattgcttgaacc

SEQ ID NO: 1325 - DNA, 20 bp, synthetic construct
  misc_feature 1..20: note = Synthetic Sequence
  source 1..20: mol_type = other DNA
tgaggacatgagatttggga

SEQ ID NO: 1326 - DNA, 20 bp, synthetic construct
  misc_feature 1..20: note = Synthetic Sequence
  source 1..20: mol_type = other DNA
gagaatcgcttgaaccgggg

SEQ ID NO: 1327 - DNA, 20 bp, synthetic construct
  misc_feature 1..20: note = Synthetic Sequence
  source 1..20: mol_type = other DNA
tgcttgaacctgggaggtag

SEQ ID NO: 1328 - DNA, 20 bp, synthetic construct
  misc_feature 1..20: note = Synthetic Sequence
  source 1..20: mol_type = other DNA
tcaagaaataaccataaaaa

SEQ ID NO: 1329 - DNA, 20 bp, synthetic construct
  misc_feature 1..20: note = Synthetic Sequence
  source 1..20: mol_type = other DNA
caagagcagcctggccaaca

SEQ ID NO: 1330 - DNA, 20 bp, synthetic construct
  misc_feature 1..20: note = Synthetic Sequence
  source 1..20: mol_type = other DNA
ggcttgaacccaggaggtgg

SEQ ID NO: 1331 - DNA, 20 bp, synthetic construct
  misc_feature 1..20: note = Synthetic Sequence
  source 1..20: mol_type = other DNA
cacttgaaccctggaggcag

SEQ ID NO: 1332 - DNA, 20 bp, synthetic construct
  misc_feature 1..20: note = Synthetic Sequence
  source 1..20: mol_type = other DNA
cgcttgaaccagggaggcag

SEQ ID NO: 1333 - DNA, 20 bp, synthetic construct
  misc_feature 1..20: note = Synthetic Sequence
  source 1..20: mol_type = other DNA
gagaatggcgtgaaccccag

SEQ ID NO: 1334 - DNA, 20 bp, synthetic construct
  misc_feature 1..20: note = Synthetic Sequence
  source 1..20: mol_type = other DNA
tcaggagtttcagaccagcc

SEQ ID NO: 1335 - DNA, 20 bp, synthetic construct
  misc_feature 1..20: note = Synthetic Sequence
  source 1..20: mol_type = other DNA
ctcacagttccacgtggctg

SEQ ID NO: 1336 - DNA, 20 bp, synthetic construct
  misc_feature 1..20: note = Synthetic Sequence
  source 1..20: mol_type = other DNA
acaatcatggcagaaggtga

SEQ ID NO: 1337 - DNA, 20 bp, synthetic construct
  misc_feature 1..20: note = Synthetic Sequence
  source 1..20: mol_type = other DNA
caagaaataaccataaaaat

SEQ ID NO: 1338 - DNA, 20 bp, synthetic construct
  misc_feature 1..20: note = Synthetic Sequence
  source 1..20: mol_type = other DNA
tggccaaataggaacagctc

SEQ ID NO: 1339 - DNA, 20 bp, synthetic construct
  misc_feature 1..20: note = Synthetic Sequence
  source 1..20: mol_type = other DNA
tgaacaggcaacccacaaaa

SEQ ID NO: 1340 - DNA, 20 bp, synthetic construct
  misc_feature 1..20: note = Synthetic Sequence
  source 1..20: mol_type = other DNA
tttgagctccttatatattc

SEQ ID NO: 1341 - DNA, 20 bp, synthetic construct
  misc_feature 1..20: note = Synthetic Sequence
  source 1..20: mol_type = other DNA
gagaattgtttgaacccggg

SEQ ID NO: 1342 - DNA, 20 bp, synthetic construct
  misc_feature 1..20: note = Synthetic Sequence
  source 1..20: mol_type = other DNA
gcaactcaggaggctgaggc

SEQ ID NO: 1343 - DNA, 20 bp, synthetic construct
  misc_feature 1..20: note = Synthetic Sequence
  source 1..20: mol_type = other DNA
gaacaggcaacccacaaaat

SEQ ID NO: 1344 - DNA, 20 bp, synthetic construct
  misc_feature 1..20: note = Synthetic Sequence
  source 1..20: mol_type = other DNA
gagaattgcttgaacccgga

SEQ ID NO: 1345 - DNA, 20 bp, synthetic construct
  misc_feature 1..20: note = Synthetic Sequence
  source 1..20: mol_type = other DNA
cgagaccgtcctggctaaca

SEQ ID NO: 1346 - DNA, 20 bp, synthetic construct
  misc_feature 1..20: note = Synthetic Sequence
  source 1..20: mol_type = other DNA
ggatcaggaaaaataactaa

SEQ ID NO: 1347 - DNA, 20 bp, synthetic construct
  misc_feature 1..20: note = Synthetic Sequence
  source 1..20: mol_type = other DNA
cgcttgaactcgggaggcag

SEQ ID NO: 1348 - DNA, 20 bp, synthetic construct
  misc_feature 1..20: note = Synthetic Sequence
  source 1..20: mol_type = other DNA
taaattatactttaagttct

SEQ ID NO: 1349 - DNA, 20 bp, synthetic construct
  misc_feature 1..20: note = Synthetic Sequence
  source 1..20: mol_type = other DNA
taggtaaatgtgtgccatgg

SEQ ID NO: 1350 - DNA, 20 bp, synthetic construct
  misc_feature 1..20: note = Synthetic Sequence
  source 1..20: mol_type = other DNA
tgcttgaacccaggaggtag

SEQ ID NO: 1351 - DNA, 20 bp, synthetic construct
  misc_feature 1..20: note = Synthetic Sequence
  source 1..20: mol_type = other DNA
tgggtactaggcttaatacc

SEQ ID NO: 1352 - DNA, 20 bp, synthetic construct
  misc_feature 1..20: note = Synthetic Sequence
  source 1..20: mol_type = other DNA
ccacaacatgtgggaattat

SEQ ID NO: 1353 - DNA, 20 bp, synthetic construct
  misc_feature 1..20: note = Synthetic Sequence
  source 1..20: mol_type = other DNA
acataggtaaacgtgtgcca

SEQ ID NO: 1354 - DNA, 20 bp, synthetic construct
  misc_feature 1..20: note = Synthetic Sequence
  source 1..20: mol_type = other DNA
cagtgcagcggtgggctgaa

SEQ ID NO: 1355 - DNA, 20 bp, synthetic construct
  misc_feature 1..20: note = Synthetic Sequence
  source 1..20: mol_type = other DNA
caggagaattgcttaaacct

SEQ ID NO: 1356 - DNA, 20 bp, synthetic construct
  misc_feature 1..20: note = Synthetic Sequence
  source 1..20: mol_type = other DNA
caggggaatcgcttgaacct

SEQ ID NO: 1357 - DNA, 20 bp, synthetic construct
  misc_feature 1..20: note = Synthetic Sequence
  source 1..20: mol_type = other DNA
gagatctgatgggtttatca

SEQ ID NO: 1358 - DNA, 20 bp, synthetic construct
  misc_feature 1..20: note = Synthetic Sequence
  source 1..20: mol_type = other DNA
gaccaagaacccaccaattc

SEQ ID NO: 1359 - DNA, 20 bp, synthetic construct
  misc_feature 1..20: note = Synthetic Sequence
  source 1..20: mol_type = other DNA
gcaggagaatggcgggaacc

SEQ ID NO: 1360 - DNA, 20 bp, synthetic construct
  misc_feature 1..20: note = Synthetic Sequence
  source 1..20: mol_type = other DNA
acataggtaaatgtgtgcca

SEQ ID NO: 1361 - DNA, 20 bp, synthetic construct
  misc_feature 1..20: note = Synthetic Sequence
  source 1..20: mol_type = other DNA
gcaggagaaccacttgaacc

SEQ ID NO: 1362 - DNA, 20 bp, synthetic construct
  misc_feature 1..20: note = Synthetic Sequence
  source 1..20: mol_type = other DNA
cccataattcccacatgttg

SEQ ID NO: 1363 - DNA, 20 bp, synthetic construct
  misc_feature 1..20: note = Synthetic Sequence
  source 1..20: mol_type = other DNA
ccaggagaaggaatttcaca

SEQ ID NO: 1364 - DNA, 20 bp, synthetic construct
  misc_feature 1..20: note = Synthetic Sequence
  source 1..20: mol_type = other DNA
ctcttgaacccgggaggtgg

SEQ ID NO: 1365 - DNA, 20 bp, synthetic construct
  misc_feature 1..20: note = Synthetic Sequence
  source 1..20: mol_type = other DNA
gggaggctgaggcaggagag

SEQ ID NO: 1366 - DNA, 20 bp, synthetic construct
  misc_feature 1..20: note = Synthetic Sequence
  source 1..20: mol_type = other DNA
ctcaaatgatccacccgcct

SEQ ID NO: 1367 - DNA, 20 bp, synthetic construct
  misc_feature 1..20: note = Synthetic Sequence
  source 1..20: mol_type = other DNA
ataactgttgtgggtattga

SEQ ID NO: 1368 - DNA, 20 bp, synthetic construct
  misc_feature 1..20: note = Synthetic Sequence
  source 1..20: mol_type = other DNA
taaaattgctaatgaagttt

SEQ ID NO: 1369 - DNA, 20 bp, synthetic construct
  misc_feature 1..20: note = Synthetic Sequence
  source 1..20: mol_type = other DNA
gcaggagaatagcgtgaacc

SEQ ID NO: 1370 - DNA, 20 bp, synthetic construct
  misc_feature 1..20: note = Synthetic Sequence
  source 1..20: mol_type = other DNA
aattagctgggcttggtggc

SEQ ID NO: 1371 - DNA, 20 bp, synthetic construct
  misc_feature 1..20: note = Synthetic Sequence
  source 1..20: mol_type = other DNA
cgcttgaacccaggagacgg

SEQ ID NO: 1372 - DNA, 20 bp, synthetic construct
  misc_feature 1..20: note = Synthetic Sequence
  source 1..20: mol_type = other DNA
gggtactaggcttaatacct

SEQ ID NO: 1373 - DNA, 20 bp, synthetic construct
  misc_feature 1..20: note = Synthetic Sequence
  source 1..20: mol_type = other DNA
gcaggagaatcacttgaaac

SEQ ID NO: 1374 - DNA, 20 bp, synthetic construct
  misc_feature 1..20: note = Synthetic Sequence
  source 1..20: mol_type = other DNA
gtagagacggggtttcacca

SEQ ID NO: 1375 - DNA, 20 bp, synthetic construct
  misc_feature 1..20: note = Synthetic Sequence
  source 1..20: mol_type = other DNA
gagacggagtttctccatgt

SEQ ID NO: 1376 - DNA, 20 bp, synthetic construct
  misc_feature 1..20: note = Synthetic Sequence
  source 1..20: mol_type = other DNA
ggagaattgcttgaacccag

SEQ ID NO: 1377 - DNA, 20 bp, synthetic construct
  misc_feature 1..20: note = Synthetic Sequence
  source 1..20: mol_type = other DNA
tacgtatacatgtgccatgc

SEQ ID NO: 1378 - DNA, 20 bp, synthetic construct
  misc_feature 1..20: note = Synthetic Sequence
  source 1..20: mol_type = other DNA
cgcttgaatctgggaggcag

SEQ ID NO: 1379 - DNA, 20 bp, synthetic construct
  misc_feature 1..20: note = Synthetic Sequence
  source 1..20: mol_type = other DNA
gggaatcgcttgaacctggg

SEQ ID NO: 1380 - DNA, 20 bp, synthetic construct
  misc_feature 1..20: note = Synthetic Sequence
  source 1..20: mol_type = other DNA
aaaattgctaatgaagtttc

SEQ ID NO: 1381 - DNA, 20 bp, synthetic construct
  misc_feature 1..20: note = Synthetic Sequence
  source 1..20: mol_type = other DNA
tttcaccatgttagtcagga

SEQ ID NO: 1382 - DNA, 20 bp, synthetic construct
  misc_feature 1..20: note = Synthetic Sequence
  source 1..20: mol_type = other DNA
cacttgaaccagggaggcag

SEQ ID NO: 1383 - DNA, 20 bp, synthetic construct
  misc_feature 1..20: note = Synthetic Sequence
  source 1..20: mol_type = other DNA
gagacagcgtttcaccatgt

SEQ ID NO: 1384 - DNA, 20 bp, synthetic construct
  misc_feature 1..20: note = Synthetic Sequence
  source 1..20: mol_type = other DNA
gcaggagagtcacttgaacc

SEQ ID NO: 1385 - DNA, 20 bp, synthetic construct
  misc_feature 1..20: note = Synthetic Sequence
  source 1..20: mol_type = other DNA
aatcatttgaacccgggagg

SEQ ID NO: 1386 - DNA, 20 bp, synthetic construct
  misc_feature 1..20: note = Synthetic Sequence
  source 1..20: mol_type = other DNA
caggggaatcacttgaacct

SEQ ID NO: 1387 - DNA, 20 bp, synthetic construct
  misc_feature 1..20: note = Synthetic Sequence
  source 1..20: mol_type = other DNA
tgcttgaatctgggaggtgg

SEQ ID NO: 1388 - DNA, 20 bp, synthetic construct
  misc_feature 1..20: note = Synthetic Sequence
  source 1..20: mol_type = other DNA
agtgttacagttcttaaaga

SEQ ID NO: 1389 - DNA, 20 bp, synthetic construct
  misc_feature 1..20: note = Synthetic Sequence
  source 1..20: mol_type = other DNA
aggaggctgagacaggagaa

SEQ ID NO: 1390 - DNA, 20 bp, synthetic construct
  misc_feature 1..20: note = Synthetic Sequence
  source 1..20: mol_type = other DNA
taggtaaacgtgtgccatgg

SEQ ID NO: 1391 - DNA, 20 bp, synthetic construct
  misc_feature 1..20: note = Synthetic Sequence
  source 1..20: mol_type = other DNA
aattagccaggcgtagtggc

SEQ ID NO: 1392 - DNA, 20 bp, synthetic construct
  misc_feature 1..20: note = Synthetic Sequence
  source 1..20: mol_type = other DNA
cgcttgaacctgggaagcag

SEQ ID NO: 1393 - DNA, 20 bp, synthetic construct
  misc_feature 1..20: note = Synthetic Sequence
  source 1..20: mol_type = other DNA
atggcatttgtaaactgtca

SEQ ID NO: 1394 - DNA, 20 bp, synthetic construct
  misc_feature 1..20: note = Synthetic Sequence
  source 1..20: mol_type = other DNA
ccataattcccacatgttgt

SEQ ID NO: 1395 - DNA, 20 bp, synthetic construct
  misc_feature 1..20: note = Synthetic Sequence
  source 1..20: mol_type = other DNA
ctaccatgagaacagtatgg

SEQ ID NO: 1396 - DNA, 20 bp, synthetic construct
  misc_feature 1..20: note = Synthetic Sequence
  source 1..20: mol_type = other DNA
gcaggaacaaatcacaatgg

SEQ ID NO: 1397 - DNA, 20 bp, synthetic construct
  misc_feature 1..20: note = Synthetic Sequence
  source 1..20: mol_type = other DNA
ggggcaggaacaaatcacaa

SEQ ID NO: 1398 - DNA, 20 bp, synthetic construct
  misc_feature 1..20: note = Synthetic Sequence
  source 1..20: mol_type = other DNA
aaattagccaggcgcggtgg

SEQ ID NO: 1399 - DNA, 20 bp, synthetic construct
  misc_feature 1..20: note = Synthetic Sequence
  source 1..20: mol_type = other DNA
agaatggcgtgaaccccagg

SEQ ID NO: 1400 - DNA, 20 bp, synthetic construct
  misc_feature 1..20: note = Synthetic Sequence
  source 1..20: mol_type = other DNA
gtcaaagggggtttgttctc

SEQ ID NO: 1401 - DNA, 20 bp, synthetic construct
  misc_feature 1..20: note = Synthetic Sequence
  source 1..20: mol_type = other DNA
atgacagtttacaaatgcca

SEQ ID NO: 1402 - DNA, 20 bp, synthetic construct
  misc_feature 1..20: note = Synthetic Sequence
  source 1..20: mol_type = other DNA
aaattagctgggcttggtgg

SEQ ID NO: 1403 - DNA, 20 bp, synthetic construct
  misc_feature 1..20: note = Synthetic Sequence
  source 1..20: mol_type = other DNA
cccacaacatgtgggaatta

SEQ ID NO: 1404 - DNA, 20 bp, synthetic construct
  misc_feature 1..20: note = Synthetic Sequence
  source 1..20: mol_type = other DNA
tgcttgaaccagggaggcag

SEQ ID NO: 1405 - DNA, 20 bp, synthetic construct
  misc_feature 1..20: note = Synthetic Sequence
  source 1..20: mol_type = other DNA
cgcttgaaccagggaggcgg

SEQ ID NO: 1406 - DNA, 20 bp, synthetic construct
  misc_feature 1..20: note = Synthetic Sequence
  source 1..20: mol_type = other DNA
cagactggataaagaaaatg

SEQ ID NO: 1407 - DNA, 20 bp, synthetic construct
  misc_feature 1..20: note = Synthetic Sequence
  source 1..20: mol_type = other DNA
gccgaggagggtggatcacg

SEQ ID NO: 1408 - DNA, 20 bp, synthetic construct
  misc_feature 1..20: note = Synthetic Sequence
  source 1..20: mol_type = other DNA
gcaggaaaatggcgtgaacc

SEQ ID NO: 1409 - DNA, 20 bp, synthetic construct
  misc_feature 1..20: note = Synthetic Sequence
  source 1..20: mol_type = other DNA
cgcttgaactcgggaggcgg

SEQ ID NO: 1410 - DNA, 20 bp, synthetic construct
  misc_feature 1..20: note = Synthetic Sequence
  source 1..20: mol_type = other DNA
agtcaaagggggttgttctc

SEQ ID NO: 1411 - DNA, 20 bp, synthetic construct
  misc_feature 1..20: note = Synthetic Sequence
  source 1..20: mol_type = other DNA
tggaaaattacagtcaaagg

SEQ ID NO: 1412 - DNA, 20 bp, synthetic construct
  misc_feature 1..20: note = Synthetic Sequence
  source 1..20: mol_type = other DNA
tcacacactggggcctgtcg

SEQ ID NO: 1413 - DNA, 20 bp, synthetic construct
  misc_feature 1..20: note = Synthetic Sequence
  source 1..20: mol_type = other DNA
cgcttgaacttgggaggcag

SEQ ID NO: 1414 - DNA, 20 bp, synthetic construct
  misc_feature 1..20: note = Synthetic Sequence
  source 1..20: mol_type = other DNA
tttctcacagttctggaggc

SEQ ID NO: 1415 - DNA, 20 bp, synthetic construct
  misc_feature 1..20: note = Synthetic Sequence
  source 1..20: mol_type = other DNA
gggtcacaaggtgctcagtg

SEQ ID NO: 1416 - DNA, 20 bp, synthetic construct
  misc_feature 1..20: note = Synthetic Sequence
  source 1..20: mol_type = other DNA
gcaggagaattgcttgaaac

SEQ ID NO: 1417 - DNA, 20 bp, synthetic construct
  misc_feature 1..20: note = Synthetic Sequence
  source 1..20: mol_type = other DNA
gggaattgcttgaacccagg

SEQ ID NO: 1418 - DNA, 20 bp, synthetic construct
  misc_feature 1..20: note = Synthetic Sequence
  source 1..20: mol_type = other DNA
gggaatcacttgaacctggg

SEQ ID NO: 1419 - DNA, 20 bp, synthetic construct
  misc_feature 1..20: note = Synthetic Sequence
  source 1..20: mol_type = other DNA
tccgaaaagagagtcagcga

SEQ ID NO: 1420 - DNA, 20 bp, synthetic construct
  misc_feature 1..20: note = Synthetic Sequence
  source 1..20: mol_type = other DNA
tgtgggagggacccagtggg

SEQ ID NO: 1421 - DNA, 20 bp, synthetic construct
  misc_feature 1..20: note = Synthetic Sequence
  source 1..20: mol_type = other DNA
tacaagatgagatttgggtg

SEQ ID NO: 1422 - DNA, 20 bp, synthetic construct
  misc_feature 1..20: note = Synthetic Sequence
  source 1..20: mol_type = other DNA
tttgtatttctagtagagat

SEQ ID NO: 1423 - DNA, 20 bp, synthetic construct
  misc_feature 1..20: note = Synthetic Sequence
  source 1..20: mol_type = other DNA
cgcttgaactcaggaggtgg

SEQ ID NO: 1424 - DNA, 20 bp, synthetic construct
  misc_feature 1..20: note = Synthetic Sequence
  source 1..20: mol_type = other DNA
ccgaaaagagagtcagcgaa

SEQ ID NO: 1425 - DNA, 20 bp, synthetic construct
  misc_feature 1..20: note = Synthetic Sequence
  source 1..20: mol_type = other DNA
acaaagtacattctcaaggg

SEQ ID NO: 1426 - DNA, 20 bp, synthetic construct
  misc_feature 1..20: note = Synthetic Sequence
  source 1..20: mol_type = other DNA
ggtcacaaggtgctcagtgg

SEQ ID NO: 1427 - DNA, 20 bp, synthetic construct
  misc_feature 1..20: note = Synthetic Sequence
  source 1..20: mol_type = other DNA
caggagaatggcgtgagccc

SEQ ID NO: 1428 - DNA, 20 bp, synthetic construct
  misc_feature 1..20: note = Synthetic Sequence
  source 1..20: mol_type = other DNA
taaattggtaccagtagagt

SEQ ID NO: 1429 - DNA, 20 bp, synthetic construct
  misc_feature 1..20: note = Synthetic Sequence
  source 1..20: mol_type = other DNA
aaattagccgggcacggtgg

SEQ ID NO: 1430 - DNA, 20 bp, synthetic construct
  misc_feature 1..20: note = Synthetic Sequence
  source 1..20: mol_type = other DNA
tggtgagatgttccttgggc

SEQ ID NO: 1431 - DNA, 20 bp, synthetic construct
  misc_feature 1..20: note = Synthetic Sequence
  source 1..20: mol_type = other DNA
cgacaccagcctggccaaca

SEQ ID NO: 1432 - DNA, 20 bp, synthetic construct
  misc_feature 1..20: note = Synthetic Sequence
  source 1..20: mol_type = other DNA
gagaatggcgggaacccggg

SEQ ID NO: 1433 - DNA, 20 bp, synthetic construct
  misc_feature 1..20: note = Synthetic Sequence
  source 1..20: mol_type = other DNA
tcactatcacgagaacagca

SEQ ID NO: 1434 - DNA, 20 bp, synthetic construct
  misc_feature 1..20: note = Synthetic Sequence
  source 1..20: mol_type = other DNA
gggagctacaagatgagatt

SEQ ID NO: 1435 - DNA, 20 bp, synthetic construct
  misc_feature 1..20: note = Synthetic Sequence
  source 1..20: mol_type = other DNA
gagatagggtttctccatgt

SEQ ID NO: 1436 - DNA, 20 bp, synthetic construct
  misc_feature 1..20: note = Synthetic Sequence
  source 1..20: mol_type = other DNA
cgcttgaacctgggagacgg

SEQ ID NO: 1437 - DNA, 20 bp, synthetic construct
  misc_feature 1..20: note = Synthetic Sequence
  source 1..20: mol_type = other DNA
gagatggggtttcatcatat

SEQ ID NO: 1438 - DNA, 20 bp, synthetic construct
  misc_feature 1..20: note = Synthetic Sequence
  source 1..20: mol_type = other DNA
gctacaagatgagatttggg

SEQ ID NO: 1439 - DNA, 20 bp, synthetic construct
  misc_feature 1..20: note = Synthetic Sequence
  source 1..20: mol_type = other DNA
cagtgagaatttcaagccag

SEQ ID NO: 1440 - DNA, 20 bp, synthetic construct
  misc_feature 1..20: note = Synthetic Sequence
  source 1..20: mol_type = other DNA
cccttgaacctgggaggcag

SEQ ID NO: 1441 - DNA, 20 bp, synthetic construct
  misc_feature 1..20: note = Synthetic Sequence
  source 1..20: mol_type = other DNA
ctacaagatgagatttgggt

SEQ ID NO: 1442 - DNA, 20 bp, synthetic construct
  misc_feature 1..20: note = Synthetic Sequence
  source 1..20: mol_type = other DNA
ctcaggcaatccacccacct

SEQ ID NO: 1443 - DNA, 20 bp, synthetic construct
  misc_feature 1..20: note = Synthetic Sequence
  source 1..20: mol_type = other DNA
aaagtacattctcaagggtg

SEQ ID NO: 1444 - DNA, 20 bp, synthetic construct
  misc_feature 1..20: note = Synthetic Sequence
  source 1..20: mol_type = other DNA
ggagctacaagatgagattt

SEQ ID NO: 1445 - DNA, 20 bp, synthetic construct
  misc_feature 1..20: note = Synthetic Sequence
  source 1..20: mol_type = other DNA
cgcttgaatccaggaggcgg

SEQ ID NO: 1446 - DNA, 20 bp, synthetic construct
  misc_feature 1..20: note = Synthetic Sequence
  source 1..20: mol_type = other DNA
gagacggggtttcaccctgt

SEQ ID NO: 1447 - DNA, 20 bp, synthetic construct
  misc_feature 1..20: note = Synthetic Sequence
  source 1..20: mol_type = other DNA
gggagataattgaatcatgg

SEQ ID NO: 1448 - DNA, 20 bp, synthetic construct
  misc_feature 1..20: note = Synthetic Sequence
  source 1..20: mol_type = other DNA
tgcttgaacctgggaagtgg

SEQ ID NO: 1449 - DNA, 20 bp, synthetic construct
  misc_feature 1..20: note = Synthetic Sequence
  source 1..20: mol_type = other DNA
cgcttgaatccaggaggtgg

SEQ ID NO: 1450 - DNA, 20 bp, synthetic construct
  misc_feature 1..20: note = Synthetic Sequence
  source 1..20: mol_type = other DNA
ggagaatggcgtgaacccca

SEQ ID NO: 1451 - DNA, 20 bp, synthetic construct
  misc_feature 1..20: note = Synthetic Sequence
  source 1..20: mol_type = other DNA
ctcacaaagtacattctcaa

SEQ ID NO: 1452 - DNA, 20 bp, synthetic construct
  misc_feature 1..20: note = Synthetic Sequence
  source 1..20: mol_type = other DNA
gagaatggagtgaacccggg

SEQ ID NO: 1453 - DNA, 20 bp, synthetic construct
  misc_feature 1..20: note = Synthetic Sequence
  source 1..20: mol_type = other DNA
tctcacaaagtacattctca

SEQ ID NO: 1454 - DNA, 20 bp, synthetic construct
  misc_feature 1..20: note = Synthetic Sequence
  source 1..20: mol_type = other DNA
gaaaatcacttgaacccggg

SEQ ID NO: 1455 - DNA, 20 bp, synthetic construct
  misc_feature 1..20: note = Synthetic Sequence
  source 1..20: mol_type = other DNA
tttcactgtgttagccaaga

SEQ ID NO: 1456 - DNA, 20 bp, synthetic construct
  misc_feature 1..20: note = Synthetic Sequence
  source 1..20: mol_type = other DNA
tgcttgaatccaggaggtgg

SEQ ID NO: 1457 - DNA, 20 bp, synthetic construct
  misc_feature 1..20: note = Synthetic Sequence
  source 1..20: mol_type = other DNA
gcctgtaaccccagctactt

SEQ ID NO: 1458 - DNA, 20 bp, synthetic construct
  misc_feature 1..20: note = Synthetic Sequence
  source 1..20: mol_type = other DNA
tttaatcacctgggtgcagg

SEQ ID NO: 1459 - DNA, 20 bp, synthetic construct
  misc_feature 1..20: note = Synthetic Sequence
  source 1..20: mol_type = other DNA
gcaggagaatggcgtgagcc

SEQ ID NO: 1460 - DNA, 20 bp, synthetic construct
  misc_feature 1..20: note = Synthetic Sequence
  source 1..20: mol_type = other DNA
caaagtacattctcaagggt

SEQ ID NO: 1461 - DNA, 20 bp, synthetic construct
  misc_feature 1..20: note = Synthetic Sequence
  source 1..20: mol_type = other DNA
gccgaggagggcagatcacg

SEQ ID NO: 1462 - DNA, 20 bp, synthetic construct
  misc_feature 1..20: note = Synthetic Sequence
  source 1..20: mol_type = other DNA
tacaatttgagatgagattt

SEQ ID NO: 1463 - DNA, 20 bp, synthetic construct
  misc_feature 1..20: note = Synthetic Sequence
  source 1..20: mol_type = other DNA
caggagaatcactggaacct

SEQ ID NO: 1464 - DNA, 20 bp, synthetic construct
  misc_feature 1..20: note = Synthetic Sequence
  source 1..20: mol_type = other DNA
ataggtaaacttgtgtcatg

SEQ ID NO: 1465 - DNA, 20 bp, synthetic construct
  misc_feature 1..20: note = Synthetic Sequence
  source 1..20: mol_type = other DNA
gagatgttccttgggctggt

SEQ ID NO: 1466 - DNA, 20 bp, synthetic construct
  misc_feature 1..20: note = Synthetic Sequence
  source 1..20: mol_type = other DNA
gatgaacccagtacctcaga

SEQ ID NO: 1467 - DNA, 20 bp, synthetic construct
  misc_feature 1..20: note = Synthetic Sequence
  source 1..20: mol_type = other DNA
ttctcacagttctggaggct

SEQ ID NO: 1468 - DNA, 20 bp, synthetic construct
  misc_feature 1..20: note = Synthetic Sequence
  source 1..20: mol_type = other DNA
tcacaaggcaaatggaggca

SEQ ID NO: 1469 - DNA, 20 bp, synthetic construct
  misc_feature 1..20: note = Synthetic Sequence
  source 1..20: mol_type = other DNA
ctcaagtgatctgccctcct

SEQ ID NO: 1470 - DNA, 20 bp, synthetic construct
  misc_feature 1..20: note = Synthetic Sequence
  source 1..20: mol_type = other DNA
tcaggagattgagactatcc

SEQ ID NO: 1471 - DNA, 20 bp, synthetic construct
  misc_feature 1..20: note = Synthetic Sequence
  source 1..20: mol_type = other DNA
tttcaccatattgaccaggc

SEQ ID NO: 1472 - DNA, 20 bp, synthetic construct
  misc_feature 1..20: note = Synthetic Sequence
  source 1..20: mol_type = other DNA
agcgaagggagataggggtg

SEQ ID NO: 1473 - DNA, 20 bp, synthetic construct
  misc_feature 1..20: note = Synthetic Sequence
  source 1..20: mol_type = other DNA
cacttgaatccaggaggcgg

SEQ ID NO: 1474 - DNA, 20 bp, synthetic construct
  misc_feature 1..20: note = Synthetic Sequence
  source 1..20: mol_type = other DNA
cacttgaatccaggaggtgg

SEQ ID NO: 1475 - DNA, 20 bp, synthetic construct
  misc_feature 1..20: note = Synthetic Sequence
  source 1..20: mol_type = other DNA
tcacacaccagggcctgtca

SEQ ID NO: 1476 - DNA, 20 bp, synthetic construct
  misc_feature 1..20: note = Synthetic Sequence
  source 1..20: mol_type = other DNA
cgcttgaacccaagaggcag

SEQ ID NO: 1477 - DNA, 20 bp, synthetic construct
  misc_feature 1..20: note = Synthetic Sequence
  source 1..20: mol_type = other DNA
atcacaaggcaaatggaggc

SEQ ID NO: 1478 - DNA, 20 bp, synthetic construct
  misc_feature 1..20: note = Synthetic Sequence
  source 1..20: mol_type = other DNA
caatcatggcagaaggcaaa

SEQ ID NO: 1479 - DNA, 20 bp, synthetic construct
  misc_feature 1..20: note = Synthetic Sequence
  source 1..20: mol_type = other DNA
cgcttgaactcgggaggtgg

SEQ ID NO: 1480 - DNA, 20 bp, synthetic construct
  misc_feature 1..20: note = Synthetic Sequence
  source 1..20: mol_type = other DNA
cttacagttccacgtggctg

SEQ ID NO: 1481 - DNA, 20 bp, synthetic construct
  misc_feature 1..20: note = Synthetic Sequence
  source 1..20: mol_type = other DNA
cgcttgaacccaggaagcgg

SEQ ID NO: 1482 - DNA, 20 bp, synthetic construct
  misc_feature 1..20: note = Synthetic Sequence
  source 1..20: mol_type = other DNA
cgcttgaacccgggaagcag

SEQ ID NO: 1483 - DNA, 20 bp, synthetic construct
  misc_feature 1..20: note = Synthetic Sequence
  source 1..20: mol_type = other DNA
aggagaattgcttgaaccca

SEQ ID NO: 1484 - DNA, 20 bp, synthetic construct
  misc_feature 1..20: note = Synthetic Sequence
  source 1..20: mol_type = other DNA
gagaattgcctgaacccagg

SEQ ID NO: 1485 - DNA, 20 bp, synthetic construct
  misc_feature 1..20: note = Synthetic Sequence
  source 1..20: mol_type = other DNA
ggtcacaaggtgctcagtag

SEQ ID NO: 1486 - DNA, 20 bp, synthetic construct
  misc_feature 1..20: note = Synthetic Sequence
  source 1..20: mol_type = other DNA
cgcttgaacccaggaagtgg

SEQ ID NO: 1487 - DNA, 20 bp, synthetic construct
  misc_feature 1..20: note = Synthetic Sequence
  source 1..20: mol_type = other DNA
tgctgattggtagagccgag

SEQ ID NO: 1488 - DNA, 20 bp, synthetic construct
  misc_feature 1..20: note = Synthetic Sequence
  source 1..20: mol_type = other DNA
cacttgaatccgggaggcag

SEQ ID NO: 1489 - DNA, 20 bp, synthetic construct
  misc_feature 1..20: note = Synthetic Sequence
  source 1..20: mol_type = other DNA
gagagtcagcgaagggagat

SEQ ID NO: 1490 - DNA, 20 bp, synthetic construct
  misc_feature 1..20: note = Synthetic Sequence
  source 1..20: mol_type = other DNA
ggagaatggcgtgaacccgg

SEQ ID NO: 1491 - DNA, 20 bp, synthetic construct
  misc_feature 1..20: note = Synthetic Sequence
  source 1..20: mol_type = other DNA
gtaatccccagtgttggagg

SEQ ID NO: 1492 - DNA, 20 bp, synthetic construct
  misc_feature 1..20: note = Synthetic Sequence
  source 1..20: mol_type = other DNA
gggacgaagcttccagagga

SEQ ID NO: 1493 - DNA, 20 bp, synthetic construct
  misc_feature 1..20: note = Synthetic Sequence
  source 1..20: mol_type = other DNA
caggagaattgcttgaaacc

SEQ ID NO: 1494 - DNA, 20 bp, synthetic construct
  misc_feature 1..20: note = Synthetic Sequence
  source 1..20: mol_type = other DNA
cagcgaagggagataggggt

SEQ ID NO: 1495 - DNA, 20 bp, synthetic construct
  misc_feature 1..20: note = Synthetic Sequence
  source 1..20: mol_type = other DNA
gcctcagcctcccgattagc

SEQ ID NO: 1496 - DNA, 20 bp, synthetic construct
  misc_feature 1..20: note = Synthetic Sequence
  source 1..20: mol_type = other DNA
caggagaatggcgcgaaccc

SEQ ID NO: 1497 - DNA, 20 bp, synthetic construct
  misc_feature 1..20: note = Synthetic Sequence
  source 1..20: mol_type = other DNA
gggaggctgaggcaggggaa

SEQ ID NO: 1498 - DNA, 20 bp, synthetic construct
  misc_feature 1..20: note = Synthetic Sequence
  source 1..20: mol_type = other DNA
tcagcgaagggagatagggg

SEQ ID NO: 1499 - DNA, 20 bp, synthetic construct
  misc_feature 1..20: note = Synthetic Sequence
  source 1..20: mol_type = other DNA
caataaggtccaggctgagg

SEQ ID NO: 1500 - DNA, 20 bp, synthetic construct
  misc_feature 1..20: note = Synthetic Sequence
  source 1..20: mol_type = other DNA
gcaggagaatggcgcgaacc

SEQ ID NO: 1501 - DNA, 20 bp, synthetic construct
  misc_feature 1..20: note = Synthetic Sequence
  source 1..20: mol_type = other DNA
tgcttgaaccagggaggcgg

SEQ ID NO: 1502 - DNA, 20 bp, synthetic construct
  misc_feature 1..20: note = Synthetic Sequence
  source 1..20: mol_type = other DNA
agatccaagaaccctctctt

SEQ ID NO: 1503 - DNA, 20 bp, synthetic construct
  misc_feature 1..20: note = Synthetic Sequence
  source 1..20: mol_type = other DNA
taattgactcacagttctgc

SEQ ID NO: 1504 - DNA, 20 bp, synthetic construct
  misc_feature 1..20: note = Synthetic Sequence
  source 1..20: mol_type = other DNA
tattattatactttaagttc

SEQ ID NO: 1505 - DNA, 20 bp, synthetic construct
  misc_feature 1..20: note = Synthetic Sequence
  source 1..20: mol_type = other DNA
tactaagggaactcagaggc

SEQ ID NO: 1506 - DNA, 20 bp, synthetic construct
  misc_feature 1..20: note = Synthetic Sequence
  source 1..20: mol_type = other DNA
cctcagcctcccgattagct

SEQ ID NO: 1507 - DNA, 20 bp, synthetic construct
  misc_feature 1..20: note = Synthetic Sequence
  source 1..20: mol_type = other DNA
cacttgaaccctggaggtgg

SEQ ID NO: 1508 - DNA, 20 bp, synthetic construct
  misc_feature 1..20: note = Synthetic Sequence
  source 1..20: mol_type = other DNA
cactgcaggctccgcctccc

SEQ ID NO: 1509 - DNA, 20 bp, synthetic construct
  misc_feature 1..20: note = Synthetic Sequence
  source 1..20: mol_type = other DNA
cgcttgaaccctggaggcgg

SEQ ID NO: 1510 - DNA, 20 bp, synthetic construct
  misc_feature 1..20: note = Synthetic Sequence
  source 1..20: mol_type = other DNA
gcaggagaatggcatgaact

SEQ ID NO: 1511 - DNA, 20 bp, synthetic construct
  misc_feature 1..20: note = Synthetic Sequence
  source 1..20: mol_type = other DNA
cacttgaacctaggaggcgg

SEQ ID NO: 1512 - DNA, 20 bp, synthetic construct
  misc_feature 1..20: note = Synthetic Sequence
  source 1..20: mol_type = other DNA
cgcttgaacccgggagacgg

SEQ ID NO: 1513 - DNA, 20 bp, synthetic construct
  misc_feature 1..20: note = Synthetic Sequence
  source 1..20: mol_type = other DNA
cccagctaatcgggaggctg

SEQ ID NO: 1514 - DNA, 20 bp, synthetic construct
  misc_feature 1..20: note = Synthetic Sequence
  source 1..20: mol_type = other DNA
ttacaatttgagatgagatt

SEQ ID NO: 1515 - DNA, 20 bp, synthetic construct
  misc_feature 1..20: note = Synthetic Sequence
  source 1..20: mol_type = other DNA
gggaggcctcagaatcatgg

SEQ ID NO: 1516 - DNA, 20 bp, synthetic construct
  misc_feature 1..20: note = Synthetic Sequence
  source 1..20: mol_type = other DNA
gagaatcgcttgaactgggg

SEQ ID NO: 1517 - DNA, 20 bp, synthetic construct
  misc_feature 1..20: note = Synthetic Sequence
  source 1..20: mol_type = other DNA
gccgagatgggcggatcacg

SEQ ID NO: 1518 - DNA, 20 bp, synthetic construct
  misc_feature 1..20: note = Synthetic Sequence
  source 1..20: mol_type = other DNA
tactatgcagccataaaaaa

SEQ ID NO: 1519 - DNA, 20 bp, synthetic construct
  misc_feature 1..20: note = Synthetic Sequence
  source 1..20: mol_type = other DNA
acaatcatggtggaaggcaa

SEQ ID NO: 1520 - DNA, 20 bp, synthetic construct
  misc_feature 1..20: note = Synthetic Sequence
  source 1..20: mol_type = other DNA
cacttgaacccaggaagcgg

SEQ ID NO: 1521 - DNA, 20 bp, synthetic construct
  misc_feature 1..20: note = Synthetic Sequence
  source 1..20: mol_type = other DNA
aaggagaattgcttgaaccc

SEQ ID NO: 1522 - DNA, 20 bp, synthetic construct
  misc_feature 1..20: note = Synthetic Sequence
  source 1..20: mol_type = other DNA
aaaaaattagccgggcgtgt

SEQ ID NO: 1523 - DNA, 20 bp, synthetic construct
  misc_feature 1..20: note = Synthetic Sequence
  source 1..20: mol_type = other DNA
tggaggcagggcgagatcac

SEQ ID NO: 1524 - DNA, 20 bp, synthetic construct
  misc_feature 1..20: note = Synthetic Sequence
  source 1..20: mol_type = other DNA
catttgaacccaggaggcgg

SEQ ID NO: 1525 - DNA, 20 bp, synthetic construct
  misc_feature 1..20: note = Synthetic Sequence
  source 1..20: mol_type = other DNA
caggggaattgcttgaacca

SEQ ID NO: 1526 - DNA, 20 bp, synthetic construct
  misc_feature 1..20: note = Synthetic Sequence
  source 1..20: mol_type = other DNA
gcaggagaattgcttcaacc

SEQ ID NO: 1527 - DNA, 20 bp, synthetic construct
  misc_feature 1..20: note = Synthetic Sequence
  source 1..20: mol_type = other DNA
gaacacatggacacagagag

SEQ ID NO: 1528 - DNA, 20 bp, synthetic construct
  misc_feature 1..20: note = Synthetic Sequence
  source 1..20: mol_type = other DNA
gctaatcgggaggctgaggc

SEQ ID NO: 1529 - DNA, 20 bp, synthetic construct
  misc_feature 1..20: note = Synthetic Sequence
  source 1..20: mol_type = other DNA
caaggcaggtggatcatttg

SEQ ID NO: 1530 - DNA, 20 bp, synthetic construct
  misc_feature 1..20: note = Synthetic Sequence
  source 1..20: mol_type = other DNA
ctcagcctctccgagtagct

SEQ ID NO: 1531 - DNA, 20 bp, synthetic construct
  misc_feature 1..20: note = Synthetic Sequence
  source 1..20: mol_type = other DNA
tgtatctaactaatctgatg

SEQ ID NO: 1532 - DNA, 20 bp, synthetic construct
  misc_feature 1..20: note = Synthetic Sequence
  source 1..20: mol_type = other DNA
atacaaaaattagccggacg

SEQ ID NO: 1533 - DNA, 20 bp, synthetic construct
  misc_feature 1..20: note = Synthetic Sequence
  source 1..20: mol_type = other DNA
gagacgaggtttcgccatgt

SEQ ID NO: 1534 - DNA, 20 bp, synthetic construct
  misc_feature 1..20: note = Synthetic Sequence
  source 1..20: mol_type = other DNA
ttatagtatagtttgaagtc

SEQ ID NO: 1535 - DNA, 20 bp, synthetic construct
  misc_feature 1..20: note = Synthetic Sequence
  source 1..20: mol_type = other DNA
attaataaccagaatatata

SEQ ID NO: 1536 - DNA, 20 bp, synthetic construct
  misc_feature 1..20: note = Synthetic Sequence
  source 1..20: mol_type = other DNA
tggctgaataggaacagctc

SEQ ID NO: 1537 - DNA, 20 bp, synthetic construct
  misc_feature 1..20: note = Synthetic Sequence
  source 1..20: mol_type = other DNA
tcttgatgatatgctaaaca

SEQ ID NO: 1538 - DNA, 20 bp, synthetic construct
  misc_feature 1..20: note = Synthetic Sequence
  source 1..20: mol_type = other DNA
caggagaatggcatgaactc

SEQ ID NO: 1539 - DNA, 20 bp, synthetic construct
  misc_feature 1..20: note = Synthetic Sequence
  source 1..20: mol_type = other DNA
gagaatcacttgaaccgggg

SEQ ID NO: 1540 - DNA, 20 bp, synthetic construct
  misc_feature 1..20: note = Synthetic Sequence
  source 1..20: mol_type = other DNA
cctcagcctctccgagtagc

SEQ ID NO: 1541 - DNA, 20 bp, synthetic construct
  misc_feature 1..20: note = Synthetic Sequence
  source 1..20: mol_type = other DNA
gtgggaggagggagaggatc

SEQ ID NO: 1542 - DNA, 20 bp, synthetic construct
  misc_feature 1..20: note = Synthetic Sequence
  source 1..20: mol_type = other DNA
ccagctactcggagaggctg

SEQ ID NO: 1543 - DNA, 20 bp, synthetic construct
  misc_feature 1..20: note = Synthetic Sequence
  source 1..20: mol_type = other DNA
gagatggagtttcgccatgt

SEQ ID NO: 1544 - DNA, 20 bp, synthetic construct
  misc_feature 1..20: note = Synthetic Sequence
  source 1..20: mol_type = other DNA
tgaaaatgtggaagcaactt

SEQ ID NO: 1545 - DNA, 20 bp, synthetic construct
  misc_feature 1..20: note = Synthetic Sequence
  source 1..20: mol_type = other DNA
caagacaatgtcatcagtta

SEQ ID NO: 1546 - DNA, 20 bp, synthetic construct
  misc_feature 1..20: note = Synthetic Sequence
  source 1..20: mol_type = other DNA
tttcaccatattggccagac

SEQ ID NO: 1547 - DNA, 20 bp, synthetic construct
  misc_feature 1..20: note = Synthetic Sequence
  source 1..20: mol_type = other DNA
agccattgtggaagacagtg

SEQ ID NO: 1548 - DNA, 20 bp, synthetic construct
  misc_feature 1..20: note = Synthetic Sequence
  source 1..20: mol_type = other DNA
ggcgtgaacccgggaggtgg

SEQ ID NO: 1549 - DNA, 20 bp, synthetic construct
  misc_feature 1..20: note = Synthetic Sequence
  source 1..20: mol_type = other DNA
caatgagaacatatggacac

SEQ ID NO: 1550 - DNA, 20 bp, synthetic construct
  misc_feature 1..20: note = Synthetic Sequence
  source 1..20: mol_type = other DNA
ttcagttgcttcaggccatc

SEQ ID NO: 1551 - DNA, 20 bp, synthetic construct
  misc_feature 1..20: note = Synthetic Sequence
  source 1..20: mol_type = other DNA
gagtcagggtttcaccatgt

SEQ ID NO: 1552 - DNA, 20 bp, synthetic construct
  misc_feature 1..20: note = Synthetic Sequence
  source 1..20: mol_type = other DNA
gagaattgctggaacctggg

SEQ ID NO: 1553 - DNA, 20 bp, synthetic construct
  misc_feature 1..20: note = Synthetic Sequence
  source 1..20: mol_type = other DNA
gagacagggtttcaccctgt

SEQ ID NO: 1554 - DNA, 20 bp, synthetic construct
  misc_feature 1..20: note = Synthetic Sequence
  source 1..20: mol_type = other DNA
ttaatgactgccattctaac

SEQ ID NO: 1555 - DNA, 20 bp, synthetic construct
  misc_feature 1..20: note = Synthetic Sequence
  source 1..20: mol_type = other DNA
gagtcagcgaagggagatag

SEQ ID NO: 1556 - DNA, 20 bp, synthetic construct
  misc_feature 1..20: note = Synthetic Sequence
  source 1..20: mol_type = other DNA
ggaaaattacagtcaaaggg

SEQ ID NO: 1557 - DNA, 20 bp, synthetic construct
  misc_feature 1..20: note = Synthetic Sequence
  source 1..20: mol_type = other DNA
ttgatgatatgctaaacaag

SEQ ID NO: 1558 - DNA, 20 bp, synthetic construct
  misc_feature 1..20: note = Synthetic Sequence
  source 1..20: mol_type = other DNA
atgattcaattatctcccac

SEQ ID NO: 1559 - DNA, 20 bp, synthetic construct
  misc_feature 1..20: note = Synthetic Sequence
  source 1..20: mol_type = other DNA
cttgatgatatgctaaacaa

SEQ ID NO: 1560 - DNA, 20 bp, synthetic construct
  misc_feature 1..20: note = Synthetic Sequence
  source 1..20: mol_type = other DNA
ctgtatctaactaatctgat

SEQ ID NO: 1561 - DNA, 20 bp, synthetic construct
  misc_feature 1..20: note = Synthetic Sequence
  source 1..20: mol_type = other DNA
cctccacctcccaggttcaa

SEQ ID NO: 1562 - DNA, 20 bp, synthetic construct
  misc_feature 1..20: note = Synthetic Sequence
  source 1..20: mol_type = other DNA
gatccaagaaccctctcttg

SEQ ID NO: 1563 - DNA, 20 bp, synthetic construct
  misc_feature 1..20: note = Synthetic Sequence
  source 1..20: mol_type = other DNA
ttcaagtgatccacccacct

SEQ ID NO: 1564 - DNA, 20 bp, synthetic construct
  misc_feature 1..20: note = Synthetic Sequence
  source 1..20: mol_type = other DNA
cccttgaacctgggaggtgg

SEQ ID NO: 1565 - DNA, 20 bp, synthetic construct
  misc_feature 1..20: note = Synthetic Sequence
  source 1..20: mol_type = other DNA
cgcttgaacctgggaagcgg

SEQ ID NO: 1566 - DNA, 20 bp, synthetic construct
  misc_feature 1..20: note = Synthetic Sequence
  source 1..20: mol_type = other DNA
atgatatgctaaacaagggg

SEQ ID NO: 1567 - DNA, 20 bp, synthetic construct
  misc_feature 1..20: note = Synthetic Sequence
  source 1..20: mol_type = other DNA
ttaatcacctgggtgcaggc

SEQ ID NO: 1568 - DNA, 20 bp, synthetic construct
  misc_feature 1..20: note = Synthetic Sequence
  source 1..20: mol_type = other DNA
caatgagaacacctggacac

SEQ ID NO: 1569 - DNA, 20 bp, synthetic construct
  misc_feature 1..20: note = Synthetic Sequence
  source 1..20: mol_type = other DNA
caggagaatggcatgaatcc

SEQ ID NO: 1570 - DNA, 20 bp, synthetic construct
  misc_feature 1..20: note = Synthetic Sequence
  source 1..20: mol_type = other DNA
agcttgaacccaggaggtgg

SEQ ID NO: 1571 - DNA, 20 bp, synthetic construct
  misc_feature 1..20: note = Synthetic Sequence
  source 1..20: mol_type = other DNA
tgtttgaacctgggaggcag

SEQ ID NO: 1572 - DNA, 20 bp, synthetic construct
  misc_feature 1..20: note = Synthetic Sequence
  source 1..20: mol_type = other DNA
tcaggagatcgagacaatcc

SEQ ID NO: 1573 - DNA, 20 bp, synthetic construct
  misc_feature 1..20: note = Synthetic Sequence
  source 1..20: mol_type = other DNA
caggagaattgctggaacct

SEQ ID NO: 1574 - DNA, 20 bp, synthetic construct
  misc_feature 1..20: note = Synthetic Sequence
  source 1..20: mol_type = other DNA
ttgaaaaaaaattagacgaa

SEQ ID NO: 1575 - DNA, 20 bp, synthetic construct
  misc_feature 1..20: note = Synthetic Sequence
  source 1..20: mol_type = other DNA
tctgtatctaactaatctga

SEQ ID NO: 1576 - DNA, 20 bp, synthetic construct
  misc_feature 1..20: note = Synthetic Sequence
  source 1..20: mol_type = other DNA
tgcttgaacctaggaggtgg

SEQ ID NO: 1577 - DNA, 20 bp, synthetic construct
  misc_feature 1..20: note = Synthetic Sequence
  source 1..20: mol_type = other DNA
cctcataaaatgaattaggg

SEQ ID NO: 1578 - DNA, 20 bp, synthetic construct
  misc_feature 1..20: note = Synthetic Sequence
  source 1..20: mol_type = other DNA
gactcagcctgcctgcaccc

SEQ ID NO: 1579 - DNA, 20 bp, synthetic construct
  misc_feature 1..20: note = Synthetic Sequence
  source 1..20: mol_type = other DNA
cgcttgaacttgggaggcgg

SEQ ID NO: 1580 - DNA, 20 bp, synthetic construct
  misc_feature 1..20: note = Synthetic Sequence
  source 1..20: mol_type = other DNA
cagagtttcttccttctggt

SEQ ID NO: 1581 - DNA, 20 bp, synthetic construct
  misc_feature 1..20: note = Synthetic Sequence
  source 1..20: mol_type = other DNA
gagacagggtctcaccatgt

SEQ ID NO: 1582 - DNA, 20 bp, synthetic construct
  misc_feature 1..20: note = Synthetic Sequence
  source 1..20: mol_type = other DNA
tgtggatcttcagttgcttc

SEQ ID NO: 1583 - DNA, 20 bp, synthetic construct
  misc_feature 1..20: note = Synthetic Sequence
  source 1..20: mol_type = other DNA
cgcttgaacctaggaggtgg

SEQ ID NO: 1584 - DNA, 20 bp, synthetic construct
  misc_feature 1..20: note = Synthetic Sequence
  source 1..20: mol_type = other DNA
ccccaagcagcctaactggg

SEQ ID NO: 1585 - DNA, 20 bp, synthetic construct
  misc_feature 1..20: note = Synthetic Sequence
  source 1..20: mol_type = other DNA
tattcacagtagcaaagact

SEQ ID NO: 1586 - DNA, 20 bp, synthetic construct
  misc_feature 1..20: note = Synthetic Sequence
  source 1..20: mol_type = other DNA
atagtaggtgtatatattta

SEQ ID NO: 1587 - DNA, 20 bp, synthetic construct
  misc_feature 1..20: note = Synthetic Sequence
  source 1..20: mol_type = other DNA
cgcttgaacctaggaggcgg

SEQ ID NO: 1588 - DNA, 20 bp, synthetic construct
  misc_feature 1..20: note = Synthetic Sequence
  source 1..20: mol_type = other DNA
tacgtatacatgtgccatgt

SEQ ID NO: 1589 - DNA, 20 bp, synthetic construct
  misc_feature 1..20: note = Synthetic Sequence
  source 1..20: mol_type = other DNA
acaatgtcatcagttaaggc

SEQ ID NO: 1590 - DNA, 20 bp, synthetic construct
  misc_feature 1..20: note = Synthetic Sequence
  source 1..20: mol_type = other DNA
cactatcatgagaacagcac

SEQ ID NO: 1591 - DNA, 20 bp, synthetic construct
  misc_feature 1..20: note = Synthetic Sequence
  source 1..20: mol_type = other DNA
gagatgaggtttcactatgt

SEQ ID NO: 1592 - DNA, 20 bp, synthetic construct
  misc_feature 1..20: note = Synthetic Sequence
  source 1..20: mol_type = other DNA
tgattgatgggcatttgggc

SEQ ID NO: 1593 - DNA, 20 bp, synthetic construct
  misc_feature 1..20: note = Synthetic Sequence
  source 1..20: mol_type = other DNA
aattagctgggcgtgatggc

SEQ ID NO: 1594 - DNA, 20 bp, synthetic construct
  misc_feature 1..20: note = Synthetic Sequence
  source 1..20: mol_type = other DNA
aggagaatggcgtgaacccg

SEQ ID NO: 1595 - DNA, 20 bp, synthetic construct
  misc_feature 1..20: note = Synthetic Sequence
  source 1..20: mol_type = other DNA
caaggcaggtggatcatctg

SEQ ID NO: 1596 - DNA, 20 bp, synthetic construct
  misc_feature 1..20: note = Synthetic Sequence
  source 1..20: mol_type = other DNA
tagtaggtgtatatatttat

SEQ ID NO: 1597 - DNA, 20 bp, synthetic construct
  misc_feature 1..20: note = Synthetic Sequence
  source 1..20: mol_type = other DNA
tgtgagcccttaaaagggac

SEQ ID NO: 1598 - DNA, 20 bp, synthetic construct
  misc_feature 1..20: note = Synthetic Sequence
  source 1..20: mol_type = other DNA
caggagaatcgcttgaactg

SEQ ID NO: 1599 - DNA, 20 bp, synthetic construct
  misc_feature 1..20: note = Synthetic Sequence
  source 1..20: mol_type = other DNA
gatacagggtttcaccatgt

SEQ ID NO: 1600 - DNA, 20 bp, synthetic construct
  misc_feature 1..20: note = Synthetic Sequence
  source 1..20: mol_type = other DNA
aaattagccgggcgtgttgg

SEQ ID NO: 1601 - DNA, 20 bp, synthetic construct
  misc_feature 1..20: note = Synthetic Sequence
  source 1..20: mol_type = other DNA
attgtaatccccagtgttgg

SEQ ID NO: 1602 - DNA, 20 bp, synthetic construct
  misc_feature 1..20: note = Synthetic Sequence
  source 1..20: mol_type = other DNA
tcctgaatacagcacaccga

SEQ ID NO: 1603 - DNA, 20 bp, synthetic construct
  misc_feature 1..20: note = Synthetic Sequence
  source 1..20: mol_type = other DNA
gggaattgcttgaaccaggg

SEQ ID NO: 1604 - DNA, 20 bp, synthetic construct
  misc_feature 1..20: note = Synthetic Sequence
  source 1..20: mol_type = other DNA
cttagcttgctgggctccat

SEQ ID NO: 1605 - DNA, 20 bp, synthetic construct
  misc_feature 1..20: note = Synthetic Sequence
  source 1..20: mol_type = other DNA
ataaagctgtttatttcacc

SEQ ID NO: 1606 - DNA, 20 bp, synthetic construct
  misc_feature 1..20: note = Synthetic Sequence
  source 1..20: mol_type = other DNA
tttatttctcacagttctgg

SEQ ID NO: 1607 - DNA, 20 bp, synthetic construct
  misc_feature 1..20: note = Synthetic Sequence
  source 1..20: mol_type = other DNA
aagggaactcagaggctggc

SEQ ID NO: 1608 - DNA, 20 bp, synthetic construct
  misc_feature 1..20: note = Synthetic Sequence
  source 1..20: mol_type = other DNA
cagaagaatggtgtgaaccc

SEQ ID NO: 1609 - DNA, 20 bp, synthetic construct
  misc_feature 1..20: note = Synthetic Sequence
  source 1..20: mol_type = other DNA
cgcttgaacctgagaggcgg

SEQ ID NO: 1610 - DNA, 20 bp, synthetic construct
  misc_feature 1..20: note = Synthetic Sequence
  source 1..20: mol_type = other DNA
gtggaagcgactttggaact

SEQ ID NO: 1611 - DNA, 20 bp, synthetic construct
  misc_feature 1..20: note = Synthetic Sequence
  source 1..20: mol_type = other DNA
aatggagtgaacccgggagg

SEQ ID NO: 1612 - DNA, 20 bp, synthetic construct
  misc_feature 1..20: note = Synthetic Sequence
  source 1..20: mol_type = other DNA
taaagctgtttatttcacct

SEQ ID NO: 1613 - DNA, 20 bp, synthetic construct
  misc_feature 1..20: note = Synthetic Sequence
  source 1..20: mol_type = other DNA
agcctcacaatcatggtgga

SEQ ID NO: 1614 - DNA, 20 bp, synthetic construct
  misc_feature 1..20: note = Synthetic Sequence
  source 1..20: mol_type = other DNA
cacttgaacccgggagatgg

SEQ ID NO: 1615 - DNA, 20 bp, synthetic construct
  misc_feature 1..20: note = Synthetic Sequence
  source 1..20: mol_type = other DNA
caaagggggttgttctctgg

SEQ ID NO: 1616 - DNA, 20 bp, synthetic construct
  misc_feature 1..20: note = Synthetic Sequence
  source 1..20: mol_type = other DNA
aatgagttcatgtcctttgt

SEQ ID NO: 1617 - DNA, 20 bp, synthetic construct
  misc_feature 1..20: note = Synthetic Sequence
  source 1..20: mol_type = other DNA
tcttagcttgctgggctcca

SEQ ID NO: 1618 - DNA, 20 bp, synthetic construct
  misc_feature 1..20: note = Synthetic Sequence
  source 1..20: mol_type = other DNA
gagaatggcgtgagcccggg

SEQ ID NO: 1619 - DNA, 20 bp, synthetic construct
  misc_feature 1..20: note = Synthetic Sequence
  source 1..20: mol_type = other DNA
cacctgaacccaggaggcag

SEQ ID NO: 1620 - DNA, 20 bp, synthetic construct
  misc_feature 1..20: note = Synthetic Sequence
  source 1..20: mol_type = other DNA
ataaagaaaagaggtttatt

SEQ ID NO: 1621 - DNA, 20 bp, synthetic construct
  misc_feature 1..20: note = Synthetic Sequence
  source 1..20: mol_type = other DNA
aattagccgggcgtgttggc

SEQ ID NO: 1622 - DNA, 20 bp, synthetic construct
  misc_feature 1..20: note = Synthetic Sequence
  source 1..20: mol_type = other DNA
cagaagaatggcgtgaacct

SEQ ID NO: 1623 - DNA, 20 bp, synthetic construct
  misc_feature 1..20: note = Synthetic Sequence
  source 1..20: mol_type = other DNA
ttaactaaaagtatccctta

SEQ ID NO: 1624 - DNA, 20 bp, synthetic construct
  misc_feature 1..20: note = Synthetic Sequence
  source 1..20: mol_type = other DNA
gaacacttggacacagggcg

SEQ ID NO: 1625 - DNA, 20 bp, synthetic construct
  misc_feature 1..20: note = Synthetic Sequence
  source 1..20: mol_type = other DNA
aaaattggtgagatgttcct

SEQ ID NO: 1626 - DNA, 20 bp, synthetic construct
  misc_feature 1..20: note = Synthetic Sequence
  source 1..20: mol_type = other DNA
cacagttctgcaggctgtac

SEQ ID NO: 1627 - DNA, 20 bp, synthetic construct
  misc_feature 1..20: note = Synthetic Sequence
  source 1..20: mol_type = other DNA
taagggaactcagaggctgg

SEQ ID NO: 1628 - DNA, 20 bp, synthetic construct
  misc_feature 1..20: note = Synthetic Sequence
  source 1..20: mol_type = other DNA
gagacgggctttcaccatgt

SEQ ID NO: 1629 - DNA, 20 bp, synthetic construct
  misc_feature 1..20: note = Synthetic Sequence
  source 1..20: mol_type = other DNA
gcaggagaatcgctcgaacc

SEQ ID NO: 1630 - DNA, 20 bp, synthetic construct
  misc_feature 1..20: note = Synthetic Sequence
  source 1..20: mol_type = other DNA
gagaatgggcgatgtttctc

SEQ ID NO: 1631 - DNA, 20 bp, synthetic construct
  misc_feature 1..20: note = Synthetic Sequence
  source 1..20: mol_type = other DNA
caggagaaccacttgaacct

SEQ ID NO: 1632 - DNA, 20 bp, synthetic construct
  misc_feature 1..20: note = Synthetic Sequence
  source 1..20: mol_type = other DNA
gccgagacgggcagatcacg

SEQ ID NO: 1633 - DNA, 20 bp, synthetic construct
  misc_feature 1..20: note = Synthetic Sequence
  source 1..20: mol_type = other DNA
tccgaaaagagagtcagcaa

SEQ ID NO: 1634 - DNA, 20 bp, synthetic construct
  misc_feature 1..20: note = Synthetic Sequence
  source 1..20: mol_type = other DNA
ggcggacggatcacgaggtc

SEQ ID NO: 1635 - DNA, 20 bp, synthetic construct
  misc_feature 1..20: note = Synthetic Sequence
  source 1..20: mol_type = other DNA
caggcacccgccaccgcgcc

SEQ ID NO: 1636 - DNA, 20 bp, synthetic construct
  misc_feature 1..20: note = Synthetic Sequence
  source 1..20: mol_type = other DNA
agaatgggcgatgtttctca

SEQ ID NO: 1637 - DNA, 20 bp, synthetic construct
  misc_feature 1..20: note = Synthetic Sequence
  source 1..20: mol_type = other DNA
gagatgggctttcaccatgt

SEQ ID NO: 1638 - DNA, 20 bp, synthetic construct
  misc_feature 1..20: note = Synthetic Sequence
  source 1..20: mol_type = other DNA
acacactggggcctgtcgtg

SEQ ID NO: 1639 - DNA, 20 bp, synthetic construct
  misc_feature 1..20: note = Synthetic Sequence
  source 1..20: mol_type = other DNA
tgctgattggtagagcccag

SEQ ID NO: 1640 - DNA, 20 bp, synthetic construct
  misc_feature 1..20: note = Synthetic Sequence
  source 1..20: mol_type = other DNA
caggaggatggcgtgaaccc

SEQ ID NO: 1641 - DNA, 20 bp, synthetic construct
  misc_feature 1..20: note = Synthetic Sequence
  source 1..20: mol_type = other DNA
ccgaaaagagagtcagcaaa

SEQ ID NO: 1642 - DNA, 20 bp, synthetic construct
  misc_feature 1..20: note = Synthetic Sequence
  source 1..20: mol_type = other DNA
tgtggaagcgactttggaac

SEQ ID NO: 1643 - DNA, 20 bp, synthetic construct
  misc_feature 1..20: note = Synthetic Sequence
  source 1..20: mol_type = other DNA
tataagatttgggtaggtaa

SEQ ID NO: 1644 - DNA, 20 bp, synthetic construct
  misc_feature 1..20: note = Synthetic Sequence
  source 1..20: mol_type = other DNA
caggagaatcacttgaagcc

SEQ ID NO: 1645 - DNA, 20 bp, synthetic construct
  misc_feature 1..20: note = Synthetic Sequence
  source 1..20: mol_type = other DNA
gagatccaagaaccctctct

SEQ ID NO: 1646 - DNA, 20 bp, synthetic construct
  misc_feature 1..20: note = Synthetic Sequence
  source 1..20: mol_type = other DNA
aatcactaataaaaacttgc

SEQ ID NO: 1647 - DNA, 20 bp, synthetic construct
  misc_feature 1..20: note = Synthetic Sequence
  source 1..20: mol_type = other DNA
aatcatggcagaaggcaaag

SEQ ID NO: 1648 - DNA, 20 bp, synthetic construct
  misc_feature 1..20: note = Synthetic Sequence
  source 1..20: mol_type = other DNA
aaaaaaaaaaaaaaaaagca

SEQ ID NO: 1649 - DNA, 20 bp, synthetic construct
  misc_feature 1..20: note = Synthetic Sequence
  source 1..20: mol_type = other DNA
aggataaatgcttgagggga

SEQ ID NO: 1650 - DNA, 20 bp, synthetic construct
  misc_feature 1..20: note = Synthetic Sequence
  source 1..20: mol_type = other DNA
gggagtctgaggcaggagaa

SEQ ID NO: 1651 - DNA, 20 bp, synthetic construct
  misc_feature 1..20: note = Synthetic Sequence
  source 1..20: mol_type = other DNA
cttacagttccatgtggctg

SEQ ID NO: 1652 - DNA, 20 bp, synthetic construct
  misc_feature 1..20: note = Synthetic Sequence
  source 1..20: mol_type = other DNA
ggcaggctgaggcaggagaa

SEQ ID NO: 1653 - DNA, 20 bp, synthetic construct
  misc_feature 1..20: note = Synthetic Sequence
  source 1..20: mol_type = other DNA
gggaagcctcacaatcatgg

SEQ ID NO: 1654 - DNA, 20 bp, synthetic construct
  misc_feature 1..20: note = Synthetic Sequence
  source 1..20: mol_type = other DNA
cactatcacgagaacagcat

SEQ ID NO: 1655 - DNA, 20 bp, synthetic construct
  misc_feature 1..20: note = Synthetic Sequence
  source 1..20: mol_type = other DNA
tgcaggctgtacaggaagca

SEQ ID NO: 1656 - DNA, 20 bp, synthetic construct
  misc_feature 1..20: note = Synthetic Sequence
  source 1..20: mol_type = other DNA
cgtttgaacctgggaggtgg

SEQ ID NO: 1657 - DNA, 20 bp, synthetic construct
  misc_feature 1..20: note = Synthetic Sequence
  source 1..20: mol_type = other DNA
tttcactgtgttagccagaa

SEQ ID NO: 1658 - DNA, 20 bp, synthetic construct
  misc_feature 1..20: note = Synthetic Sequence
  source 1..20: mol_type = other DNA
ttgaaaaaagattagacaaa

SEQ ID NO: 1659 - DNA, 20 bp, synthetic construct
  misc_feature 1..20: note = Synthetic Sequence
  source 1..20: mol_type = other DNA
gctactcaggaggctgtggc

SEQ ID NO: 1660 - DNA, 20 bp, synthetic construct
  misc_feature 1..20: note = Synthetic Sequence
  source 1..20: mol_type = other DNA
aagaatggcgtgaacctggg

SEQ ID NO: 1661 - DNA, 20 bp, synthetic construct
  misc_feature 1..20: note = Synthetic Sequence
  source 1..20: mol_type = other DNA
gagaatggcctgaacctggg

SEQ ID NO: 1662 - DNA, 20 bp, synthetic construct
  misc_feature 1..20: note = Synthetic Sequence
  source 1..20: mol_type = other DNA
gcaggaggatggcgtgaacc

SEQ ID NO: 1663 - DNA, 20 bp, synthetic construct
  misc_feature 1..20: note = Synthetic Sequence
  source 1..20: mol_type = other DNA
ctgtacaggaagcatggctg

SEQ ID NO: 1664 - DNA, 20 bp, synthetic construct
  misc_feature 1..20: note = Synthetic Sequence
  source 1..20: mol_type = other DNA
tacttgaacctgggaggcag

SEQ ID NO: 1665 - DNA, 20 bp, synthetic construct
  misc_feature 1..20: note = Synthetic Sequence
  source 1..20: mol_type = other DNA
tcaggagatcgagaccatgc

SEQ ID NO: 1666 - DNA, 20 bp, synthetic construct
  misc_feature 1..20: note = Synthetic Sequence
  source 1..20: mol_type = other DNA
gagagtcacttgaacctggg

SEQ ID NO: 1667 - DNA, 20 bp, synthetic construct
  misc_feature 1..20: note = Synthetic Sequence
  source 1..20: mol_type = other DNA
caggagaatggcctgaacct

SEQ ID NO: 1668 - DNA, 20 bp, synthetic construct
  misc_feature 1..20: note = Synthetic Sequence
  source 1..20: mol_type = other DNA
caggagatcgagaccatcct

SEQ ID NO: 1669 - DNA, 20 bp, synthetic construct
  misc_feature 1..20: note = Synthetic Sequence
  source 1..20: mol_type = other DNA
gacaggcggatcacgaggtc

SEQ ID NO: 1670 - DNA, 20 bp, synthetic construct
  misc_feature 1..20: note = Synthetic Sequence
  source 1..20: mol_type = other DNA
ggcctcagaatcatggcagg

SEQ ID NO: 1671 - DNA, 20 bp, synthetic construct
  misc_feature 1..20: note = Synthetic Sequence
  source 1..20: mol_type = other DNA
acttacagttccatgtggct

SEQ ID NO: 1672 - DNA, 20 bp, synthetic construct
  misc_feature 1..20: note = Synthetic Sequence
  source 1..20: mol_type = other DNA
gcagaagaatggtgtgaacc

SEQ ID NO: 1673 - DNA, 20 bp, synthetic construct
  misc_feature 1..20: note = Synthetic Sequence
  source 1..20: mol_type = other DNA
gagccaaatatgagtgacca

SEQ ID NO: 1674 - DNA, 20 bp, synthetic construct
  misc_feature 1..20: note = Synthetic Sequence
  source 1..20: mol_type = other DNA
gcaggagactcacttgaacc

SEQ ID NO: 1675 - DNA, 20 bp, synthetic construct
  misc_feature 1..20: note = Synthetic Sequence
  source 1..20: mol_type = other DNA
cgcttgaacccgggaggtag

SEQ ID NO: 1676 - DNA, 20 bp, synthetic construct
  misc_feature 1..20: note = Synthetic Sequence
  source 1..20: mol_type = other DNA
tgagatctgatgggtttatc

SEQ ID NO: 1677 - DNA, 20 bp, synthetic construct
  misc_feature 1..20: note = Synthetic Sequence
  source 1..20: mol_type = other DNA
cacttgaacctggaaggcgg

SEQ ID NO: 1678 - DNA, 20 bp, synthetic construct
  misc_feature 1..20: note = Synthetic Sequence
  source 1..20: mol_type = other DNA
acaggagaatggcatgaacc

SEQ ID NO: 1679 - DNA, 20 bp, synthetic construct
  misc_feature 1..20: note = Synthetic Sequence
  source 1..20: mol_type = other DNA
caggagagtcacttgaacct

SEQ ID NO: 1680 - DNA, 20 bp, synthetic construct
  misc_feature 1..20: note = Synthetic Sequence
  source 1..20: mol_type = other DNA
gagaatggcgtgaactcagg

SEQ ID NO: 1681 - DNA, 20 bp, synthetic construct
  misc_feature 1..20: note = Synthetic Sequence
  source 1..20: mol_type = other DNA
aaatttatttctcacagttc

SEQ ID NO: 1682 - DNA, 20 bp, synthetic construct
  misc_feature 1..20: note = Synthetic Sequence
  source 1..20: mol_type = other DNA
aattgaacaatgagaacacc

SEQ ID NO: 1683 - DNA, 20 bp, synthetic construct
  misc_feature 1..20: note = Synthetic Sequence
  source 1..20: mol_type = other DNA
tgattcaattatctcccacc

SEQ ID NO: 1684 - DNA, 20 bp, synthetic construct
  misc_feature 1..20: note = Synthetic Sequence
  source 1..20: mol_type = other DNA
cgcttgaaccagggagtcgg

SEQ ID NO: 1685 - DNA, 20 bp, synthetic construct
  misc_feature 1..20: note = Synthetic Sequence
  source 1..20: mol_type = other DNA
agatcacaggaccacaggac

SEQ ID NO: 1686 - DNA, 20 bp, synthetic construct
  misc_feature 1..20: note = Synthetic Sequence
  source 1..20: mol_type = other DNA
catttgaacccgggaggcag

SEQ ID NO: 1687 - DNA, 20 bp, synthetic construct
  misc_feature 1..20: note = Synthetic Sequence
  source 1..20: mol_type = other DNA
aagaaccctctcttggggtc

SEQ ID NO: 1688 - DNA, 20 bp, synthetic construct
  misc_feature 1..20: note = Synthetic Sequence
  source 1..20: mol_type = other DNA
gtcaaaggggggttgttctc

SEQ ID NO: 1689 - DNA, 20 bp, synthetic construct
  misc_feature 1..20: note = Synthetic Sequence
  source 1..20: mol_type = other DNA
gagagttgcttgaacctggg

SEQ ID NO: 1690 - DNA, 20 bp, synthetic construct
  misc_feature 1..20: note = Synthetic Sequence
  source 1..20: mol_type = other DNA
tgcttgaacccgggagacgg

SEQ ID NO: 1691 - DNA, 20 bp, synthetic construct
  misc_feature 1..20: note = Synthetic Sequence
  source 1..20: mol_type = other DNA
caagaccagccttgccaaca

SEQ ID NO: 1692 - DNA, 20 bp, synthetic construct
  misc_feature 1..20: note = Synthetic Sequence
  source 1..20: mol_type = other DNA
ctcaggtgatccgcccatct

SEQ ID NO: 1693 - DNA, 20 bp, synthetic construct
  misc_feature 1..20: note = Synthetic Sequence
  source 1..20: mol_type = other DNA
gctgtacaggaagcatggct

SEQ ID NO: 1694 - DNA, 20 bp, synthetic construct
  misc_feature 1..20: note = Synthetic Sequence
  source 1..20: mol_type = other DNA
cacttgaacccgggagacag

SEQ ID NO: 1695 - DNA, 20 bp, synthetic construct
  misc_feature 1..20: note = Synthetic Sequence
  source 1..20: mol_type = other DNA
tagagttgtgagcccttaaa

SEQ ID NO: 1696 - DNA, 20 bp, synthetic construct
  misc_feature 1..20: note = Synthetic Sequence
  source 1..20: mol_type = other DNA
gcagacaaacacgtgaacaa

SEQ ID NO: 1697 - DNA, 20 bp, synthetic construct
  misc_feature 1..20: note = Synthetic Sequence
  source 1..20: mol_type = other DNA
cactgcaagccccgcctccc

SEQ ID NO: 1698 - DNA, 20 bp, synthetic construct
  misc_feature 1..20: note = Synthetic Sequence
  source 1..20: mol_type = other DNA
ggtgaaaggcacttcttaca

SEQ ID NO: 1699 - DNA, 20 bp, synthetic construct
  misc_feature 1..20: note = Synthetic Sequence
  source 1..20: mol_type = other DNA
gaggggagagggatagcatt

SEQ ID NO: 1700 - DNA, 20 bp, synthetic construct
  misc_feature 1..20: note = Synthetic Sequence
  source 1..20: mol_type = other DNA
caaaagtcaaaattgacaaa

SEQ ID NO: 1701 - DNA, 20 bp, synthetic construct
  misc_feature 1..20: note = Synthetic Sequence
  source 1..20: mol_type = other DNA
acccacaggtgtggaggggc

SEQ ID NO: 1702 - DNA, 20 bp, synthetic construct
  misc_feature 1..20: note = Synthetic Sequence
  source 1..20: mol_type = other DNA
tgattcaattatctcccact

SEQ ID NO: 1703 - DNA, 20 bp, synthetic construct
  misc_feature 1..20: note = Synthetic Sequence
  source 1..20: mol_type = other DNA
gagggaggagggatagcatt

SEQ ID NO: 1704 - DNA, 20 bp, synthetic construct
  misc_feature 1..20: note = Synthetic Sequence
  source 1..20: mol_type = other DNA
tgccaccaaagtgggagccc

SEQ ID NO: 1705 - DNA, 20 bp, synthetic construct
  misc_feature 1..20: note = Synthetic Sequence
  source 1..20: mol_type = other DNA
tatgtatacatgtgtcatgt

SEQ ID NO: 1706 - DNA, 20 bp, synthetic construct
  misc_feature 1..20: note = Synthetic Sequence
  source 1..20: mol_type = other DNA
tgcttgaatccgggaggtgg

SEQ ID NO: 1707 - DNA, 20 bp, synthetic construct
  misc_feature 1..20: note = Synthetic Sequence
  source 1..20: mol_type = other DNA
atggaaaattacagtcaaag

SEQ ID NO: 1708 - DNA, 20 bp, synthetic construct
  misc_feature 1..20: note = Synthetic Sequence
  source 1..20: mol_type = other DNA
gagaatcgcttgaaactggg

SEQ ID NO: 1709 - DNA, 20 bp, synthetic construct
  misc_feature 1..20: note = Synthetic Sequence
  source 1..20: mol_type = other DNA
cacacactggggcctgtcgt

SEQ ID NO: 1710 - DNA, 20 bp, synthetic construct
  misc_feature 1..20: note = Synthetic Sequence
  source 1..20: mol_type = other DNA
agtgggagataattgaatca

SEQ ID NO: 1711 - DNA, 20 bp, synthetic construct
  misc_feature 1..20: note = Synthetic Sequence
  source 1..20: mol_type = other DNA
aaaagtcaaaattgacaaat

SEQ ID NO: 1712 - DNA, 20 bp, synthetic construct
  misc_feature 1..20: note = Synthetic Sequence
  source 1..20: mol_type = other DNA
attatatgctaaacaagggg

SEQ ID NO: 1713 - DNA, 20 bp, synthetic construct
  misc_feature 1..20: note = Synthetic Sequence
  source 1..20: mol_type = other DNA
caacgagaacacatggacac

SEQ ID NO: 1714 - DNA, 20 bp, synthetic construct
  misc_feature 1..20: note = Synthetic Sequence
  source 1..20: mol_type = other DNA
gacttacagttccatgtggc

SEQ ID NO: 1715 - DNA, 20 bp, synthetic construct
  misc_feature 1..20: note = Synthetic Sequence
  source 1..20: mol_type = other DNA
gggcgagatcacaggaccac

SEQ ID NO: 1716 - DNA, 20 bp, synthetic construct
  misc_feature 1..20: note = Synthetic Sequence
  source 1..20: mol_type = other DNA
tgagactatcctggctaaca

SEQ ID NO: 1717 - DNA, 20 bp, synthetic construct
  misc_feature 1..20: note = Synthetic Sequence
  source 1..20: mol_type = other DNA
agcatgagcgacgcagaaga

SEQ ID NO: 1718 - DNA, 20 bp, synthetic construct
  misc_feature 1..20: note = Synthetic Sequence
  source 1..20: mol_type = other DNA
tcaggagatcaagaccaccc

SEQ ID NO: 1719 - DNA, 20 bp, synthetic construct
  misc_feature 1..20: note = Synthetic Sequence
  source 1..20: mol_type = other DNA
taatggaaaattacagtcaa

SEQ ID NO: 1720 - DNA, 20 bp, synthetic construct
  misc_feature 1..20: note = Synthetic Sequence
  source 1..20: mol_type = other DNA
tgtgggagggacccaggggg

SEQ ID NO: 1721 - DNA, 20 bp, synthetic construct
  misc_feature 1..20: note = Synthetic Sequence
  source 1..20: mol_type = other DNA
aggggagggagtgtacgaat

SEQ ID NO: 1722 - DNA, 20 bp, synthetic construct
  misc_feature 1..20: note = Synthetic Sequence
  source 1..20: mol_type = other DNA
cttgattatatgctaaacaa

SEQ ID NO: 1723 - DNA, 20 bp, synthetic construct
  misc_feature 1..20: note = Synthetic Sequence
  source 1..20: mol_type = other DNA
caggagaatcgcttgaaact

SEQ ID NO: 1724 - DNA, 20 bp, synthetic construct
  misc_feature 1..20: note = Synthetic Sequence
  source 1..20: mol_type = other DNA
ggacacatctgaacatctga

SEQ ID NO: 1725 - DNA, 20 bp, synthetic construct
  misc_feature 1..20: note = Synthetic Sequence
  source 1..20: mol_type = other DNA
ctcaagcgatctgcccacct

SEQ ID NO: 1726 - DNA, 20 bp, synthetic construct
  misc_feature 1..20: note = Synthetic Sequence
  source 1..20: mol_type = other DNA
caggataatcgcttgaacct

SEQ ID NO: 1727 - DNA, 20 bp, synthetic construct
  misc_feature 1..20: note = Synthetic Sequence
  source 1..20: mol_type = other DNA
tgtttgaacctgggaggcgg

SEQ ID NO: 1728 - DNA, 20 bp, synthetic construct
  misc_feature 1..20: note = Synthetic Sequence
  source 1..20: mol_type = other DNA
aaatgaggaagaagcaaaag

SEQ ID NO: 1729 - DNA, 20 bp, synthetic construct
  misc_feature 1..20: note = Synthetic Sequence
  source 1..20: mol_type = other DNA
aaggagaatggcgtgaaccc

SEQ ID NO: 1730 - DNA, 20 bp, synthetic construct
  misc_feature 1..20: note = Synthetic Sequence
  source 1..20: mol_type = other DNA
aatggaaaattacagtcaaa

SEQ ID NO: 1731 - DNA, 20 bp, synthetic construct
  misc_feature 1..20: note = Synthetic Sequence
  source 1..20: mol_type = other DNA
aagagaaagagtacaaagag

SEQ ID NO: 1732 - DNA, 20 bp, synthetic construct
  misc_feature 1..20: note = Synthetic Sequence
  source 1..20: mol_type = other DNA
taactaaaagtatcccttat

SEQ ID NO: 1733 - DNA, 20 bp, synthetic construct
  misc_feature 1..20: note = Synthetic Sequence
  source 1..20: mol_type = other DNA
gagatagggtttcaccatat

SEQ ID NO: 1734 - DNA, 20 bp, synthetic construct
  misc_feature 1..20: note = Synthetic Sequence
  source 1..20: mol_type = other DNA
cgtttgaacccaggaggtgg

SEQ ID NO: 1735 - DNA, 20 bp, synthetic construct
  misc_feature 1..20: note = Synthetic Sequence
  source 1..20: mol_type = other DNA
caggagactcacttgaaccc

SEQ ID NO: 1736 - DNA, 20 bp, synthetic construct
  misc_feature 1..20: note = Synthetic Sequence
  source 1..20: mol_type = other DNA
aaccagcgttcagcatatgg

SEQ ID NO: 1737 - DNA, 20 bp, synthetic construct
  misc_feature 1..20: note = Synthetic Sequence
  source 1..20: mol_type = other DNA
ggtctcaaactgctgacctc

SEQ ID NO: 1738 - DNA, 20 bp, synthetic construct
  misc_feature 1..20: note = Synthetic Sequence
  source 1..20: mol_type = other DNA
taactaatctgatggggacg

SEQ ID NO: 1739 - DNA, 20 bp, synthetic construct
  misc_feature 1..20: note = Synthetic Sequence
  source 1..20: mol_type = other DNA
tcttgattatatgctaaaca

SEQ ID NO: 1740 - DNA, 20 bp, synthetic construct
  misc_feature 1..20: note = Synthetic Sequence
  source 1..20: mol_type = other DNA
gttattaatcccttgtcaga

SEQ ID NO: 1741 - DNA, 20 bp, synthetic construct
  misc_feature 1..20: note = Synthetic Sequence
  source 1..20: mol_type = other DNA
ggcctcacaatcatggcgga

SEQ ID NO: 1742 - DNA, 20 bp, synthetic construct
  misc_feature 1..20: note = Synthetic Sequence
  source 1..20: mol_type = other DNA
cgagaccatcctggcgaaca

SEQ ID NO: 1743 - DNA, 20 bp, synthetic construct
  misc_feature 1..20: note = Synthetic Sequence
  source 1..20: mol_type = other DNA
taatgagaacacatggacac

SEQ ID NO: 1744 - DNA, 20 bp, synthetic construct
  misc_feature 1..20: note = Synthetic Sequence
  source 1..20: mol_type = other DNA
caaaaatgtggaagcaactt

SEQ ID NO: 1745 - DNA, 20 bp, synthetic construct
  misc_feature 1..20: note = Synthetic Sequence
  source 1..20: mol_type = other DNA
cctacccaaatcttataaaa

SEQ ID NO: 1746 - DNA, 20 bp, synthetic construct
  misc_feature 1..20: note = Synthetic Sequence
  source 1..20: mol_type = other DNA
atttgatcaagtggaagaaa

SEQ ID NO: 1747 - DNA, 20 bp, synthetic construct
  misc_feature 1..20: note = Synthetic Sequence
  source 1..20: mol_type = other DNA
caaaagccagaattgacaaa

SEQ ID NO: 1748 - DNA, 20 bp, synthetic construct
  misc_feature 1..20: note = Synthetic Sequence
  source 1..20: mol_type = other DNA
aaaagccagaattgacaaat

SEQ ID NO: 1749 - DNA, 20 bp, synthetic construct
  misc_feature 1..20: note = Synthetic Sequence
  source 1..20: mol_type = other DNA
aattagccgggcgtgatggt

SEQ ID NO: 1750 - DNA, 20 bp, synthetic construct
  misc_feature 1..20: note = Synthetic Sequence
  source 1..20: mol_type = other DNA
agagtcagcaaagggagata

SEQ ID NO: 1751 - DNA, 20 bp, synthetic construct
  misc_feature 1..20: note = Synthetic Sequence
  source 1..20: mol_type = other DNA
tttcaccgtgttcgccagga

SEQ ID NO: 1752 - DNA, 20 bp, synthetic construct
  misc_feature 1..20: note = Synthetic Sequence
  source 1..20: mol_type = other DNA
tagatcccatttgtcaattc

SEQ ID NO: 1753 - DNA, 20 bp, synthetic construct
  misc_feature 1..20: note = Synthetic Sequence
  source 1..20: mol_type = other DNA
cgcttgaacccaggaggagg

SEQ ID NO: 1754 - DNA, 20 bp, synthetic construct
  misc_feature 1..20: note = Synthetic Sequence
  source 1..20: mol_type = other DNA
tggagggtgggaggagggag

SEQ ID NO: 1755 - DNA, 20 bp, synthetic construct
  misc_feature 1..20: note = Synthetic Sequence
  source 1..20: mol_type = other DNA
aaatacccacaggtgtggag

SEQ ID NO: 1756 - DNA, 20 bp, synthetic construct
  misc_feature 1..20: note = Synthetic Sequence
  source 1..20: mol_type = other DNA
tcattagttcttataggttt

SEQ ID NO: 1757 - DNA, 20 bp, synthetic construct
  misc_feature 1..20: note = Synthetic Sequence
  source 1..20: mol_type = other DNA
caagatcagcctggccaaga

SEQ ID NO: 1758 - DNA, 20 bp, synthetic construct
  misc_feature 1..20: note = Synthetic Sequence
  source 1..20: mol_type = other DNA
caggagaatgacatgaaccc

SEQ ID NO: 1759 - DNA, 20 bp, synthetic construct
  misc_feature 1..20: note = Synthetic Sequence
  source 1..20: mol_type = other DNA
ttctgatgttcggatgtgtt

SEQ ID NO: 1760 - DNA, 20 bp, synthetic construct
  misc_feature 1..20: note = Synthetic Sequence
  source 1..20: mol_type = other DNA
ctcctgacctcgtgatccgc

SEQ ID NO: 1761 - DNA, 20 bp, synthetic construct
  misc_feature 1..20: note = Synthetic Sequence
  source 1..20: mol_type = other DNA
ggattatcattagttcttat

SEQ ID NO: 1762 - DNA, 20 bp, synthetic construct
  misc_feature 1..20: note = Synthetic Sequence
  source 1..20: mol_type = other DNA
ttctgatgttcagatgtgtt

SEQ ID NO: 1763 - DNA, 20 bp, synthetic construct
  misc_feature 1..20: note = Synthetic Sequence
  source 1..20: mol_type = other DNA
gagaatgacgtgaacccagg

SEQ ID NO: 1764 - DNA, 20 bp, synthetic construct
  misc_feature 1..20: note = Synthetic Sequence
  source 1..20: mol_type = other DNA
taaactgtcatggtgctggt

SEQ ID NO: 1765 - DNA, 20 bp, synthetic construct
  misc_feature 1..20: note = Synthetic Sequence
  source 1..20: mol_type = other DNA
gatttgatcaagtggaagaa

SEQ ID NO: 1766 - DNA, 20 bp, synthetic construct
  misc_feature 1..20: note = Synthetic Sequence
  source 1..20: mol_type = other DNA
ttgggtaggtaaaggaaaaa

SEQ ID NO: 1767 - DNA, 20 bp, synthetic construct
  misc_feature 1..20: note = Synthetic Sequence
  source 1..20: mol_type = other DNA
tttgtaaactgtcatggtgc

SEQ ID NO: 1768 - DNA, 20 bp, synthetic construct
  misc_feature 1..20: note = Synthetic Sequence
  source 1..20: mol_type = other DNA
tgggtaggtaaaggaaaaag

SEQ ID NO: 1769 - DNA, 20 bp, synthetic construct
  misc_feature 1..20: note = Synthetic Sequence
  source 1..20: mol_type = other DNA
ttgattatatgctaaacaag

SEQ ID NO: 1770 - DNA, 20 bp, synthetic construct
  misc_feature 1..20: note = Synthetic Sequence
  source 1..20: mol_type = other DNA
cgcttgaaccagggagtcag

SEQ ID NO: 1771 - DNA, 20 bp, synthetic construct
  misc_feature 1..20: note = Synthetic Sequence
  source 1..20: mol_type = other DNA
ggctgtacaggaagcatggc

SEQ ID NO: 1772 - DNA, 20 bp, synthetic construct
  misc_feature 1..20: note = Synthetic Sequence
  source 1..20: mol_type = other DNA
tgagacgggtggatcacctg

SEQ ID NO: 1773 - DNA, 20 bp, synthetic construct
  misc_feature 1..20: note = Synthetic Sequence
  source 1..20: mol_type = other DNA
tttctcagggctgcttcgag

SEQ ID NO: 1774 - DNA, 20 bp, synthetic construct
  misc_feature 1..20: note = Synthetic Sequence
  source 1..20: mol_type = other DNA
agaaatacccacaggtgtgg

SEQ ID NO: 1775 - DNA, 20 bp, synthetic construct
  misc_feature 1..20: note = Synthetic Sequence
  source 1..20: mol_type = other DNA
ctggagttgttcgttcctcc

SEQ ID NO: 1776 - DNA, 20 bp, synthetic construct
  misc_feature 1..20: note = Synthetic Sequence
  source 1..20: mol_type = other DNA
tataggatttgggaaggtaa

SEQ ID NO: 1777 - DNA, 20 bp, synthetic construct
  misc_feature 1..20: note = Synthetic Sequence
  source 1..20: mol_type = other DNA
gaaatacccacaggtgtgga

SEQ ID NO: 1778 - DNA, 20 bp, synthetic construct
  misc_feature 1..20: note = Synthetic Sequence
  source 1..20: mol_type = other DNA
tacaggaagcatggctgggg

SEQ ID NO: 1779 - DNA, 20 bp, synthetic construct
  misc_feature 1..20: note = Synthetic Sequence
  source 1..20: mol_type = other DNA
attactgggtatatgcccaa

SEQ ID NO: 1780 - DNA, 20 bp, synthetic construct
  misc_feature 1..20: note = Synthetic Sequence
  source 1..20: mol_type = other DNA
ccaatcggctctctgtaaaa

SEQ ID NO: 1781 - DNA, 20 bp, synthetic construct
  misc_feature 1..20: note = Synthetic Sequence
  source 1..20: mol_type = other DNA
tcagagccctcgcttgctct

SEQ ID NO: 1782 - DNA, 20 bp, synthetic construct
  misc_feature 1..20: note = Synthetic Sequence
  source 1..20: mol_type = other DNA
gagagcaagcgagggctctg

SEQ ID NO: 1783 - DNA, 20 bp, synthetic construct
  misc_feature 1..20: note = Synthetic Sequence
  source 1..20: mol_type = other DNA
aaaagagagtcagcaaaggg

SEQ ID NO: 1784 - DNA, 20 bp, synthetic construct
  misc_feature 1..20: note = Synthetic Sequence
  source 1..20: mol_type = other DNA
gagagtcagtgaagggagat

SEQ ID NO: 1785 - DNA, 20 bp, synthetic construct
  misc_feature 1..20: note = Synthetic Sequence
  source 1..20: mol_type = other DNA
tttcaccatgttagccggga

SEQ ID NO: 1786 - DNA, 20 bp, synthetic construct
  misc_feature 1..20: note = Synthetic Sequence
  source 1..20: mol_type = other DNA
acccagggacacaaaaactg

SEQ ID NO: 1787 - DNA, 20 bp, synthetic construct
  misc_feature 1..20: note = Synthetic Sequence
  source 1..20: mol_type = other DNA
gtccggaattggtgggttct

SEQ ID NO: 1788 - DNA, 20 bp, synthetic construct
  misc_feature 1..20: note = Synthetic Sequence
  source 1..20: mol_type = other DNA
acaagacaattgtggggaga

SEQ ID NO: 1789 - DNA, 20 bp, synthetic construct
  misc_feature 1..20: note = Synthetic Sequence
  source 1..20: mol_type = other DNA
gcaggagaatgacatgaacc

SEQ ID NO: 1790 - DNA, 20 bp, synthetic construct
  misc_feature 1..20: note = Synthetic Sequence
  source 1..20: mol_type = other DNA
gagatagggtttcgccatgt

SEQ ID NO: 1791 - DNA, 20 bp, synthetic construct
  misc_feature 1..20: note = Synthetic Sequence
  source 1..20: mol_type = other DNA
cacaagacaattgtggggag

SEQ ID NO: 1792 - DNA, 20 bp, synthetic construct
  misc_feature 1..20: note = Synthetic Sequence
  source 1..20: mol_type = other DNA
gaaaggcacttcttacatgg

SEQ ID NO: 1793 - DNA, 20 bp, synthetic construct
  misc_feature 1..20: note = Synthetic Sequence
  source 1..20: mol_type = other DNA
tcagcgaagggagataaggg

SEQ ID NO: 1794 - DNA, 20 bp, synthetic construct
  misc_feature 1..20: note = Synthetic Sequence
  source 1..20: mol_type = other DNA
gagagtcagcaaagggagat

SEQ ID NO: 1795 - DNA, 20 bp, synthetic construct
  misc_feature 1..20: note = Synthetic Sequence
  source 1..20: mol_type = other DNA
agagagtcagcaaagggtgg

SEQ ID NO: 1796 - DNA, 20 bp, synthetic construct
  misc_feature 1..20: note = Synthetic Sequence
  source 1..20: mol_type = other DNA
gagaaggggtttctccatgt

SEQ ID NO: 1797 - DNA, 20 bp, synthetic construct
  misc_feature 1..20: note = Synthetic Sequence
  source 1..20: mol_type = other DNA
gggaggtaactgaatcatgg

SEQ ID NO: 1798 - DNA, 20 bp, synthetic construct
  misc_feature 1..20: note = Synthetic Sequence
  source 1..20: mol_type = other DNA
attgaatctataaattgctt

SEQ ID NO: 1799 - DNA, 20 bp, synthetic construct
  misc_feature 1..20: note = Synthetic Sequence
  source 1..20: mol_type = other DNA
tgtttgaacccgggaggcag

SEQ ID NO: 1800 - DNA, 20 bp, synthetic construct
  misc_feature 1..20: note = Synthetic Sequence
  source 1..20: mol_type = other DNA
gtaaactgtcatggtgctgg

SEQ ID NO: 1801 - DNA, 20 bp, synthetic construct
  misc_feature 1..20: note = Synthetic Sequence
  source 1..20: mol_type = other DNA
gctcatgcctatgtcctgaa

SEQ ID NO: 1802 - DNA, 20 bp, synthetic construct
  misc_feature 1..20: note = Synthetic Sequence
  source 1..20: mol_type = other DNA
tgaaaagatacctgaaaatg

SEQ ID NO: 1803 - DNA, 20 bp, synthetic construct
  misc_feature 1..20: note = Synthetic Sequence
  source 1..20: mol_type = other DNA
cgcttgaacctgggaggagg

SEQ ID NO: 1804 - DNA, 20 bp, synthetic construct
  misc_feature 1..20: note = Synthetic Sequence
  source 1..20: mol_type = other DNA
cagcgaagggagataagggt

SEQ ID NO: 1805 - DNA, 20 bp, synthetic construct
  misc_feature 1..20: note = Synthetic Sequence
  source 1..20: mol_type = other DNA
gggtaggtaaaggaaaaagg

SEQ ID NO: 1806 - DNA, 20 bp, synthetic construct
  misc_feature 1..20: note = Synthetic Sequence
  source 1..20: mol_type = other DNA
cgagacaatcctggctaaca

SEQ ID NO: 1807 - DNA, 20 bp, synthetic construct
  misc_feature 1..20: note = Synthetic Sequence
  source 1..20: mol_type = other DNA
gagaatggcatgaactcggg

SEQ ID NO: 1808 - DNA, 20 bp, synthetic construct
  misc_feature 1..20: note = Synthetic Sequence
  source 1..20: mol_type = other DNA
ggtacatgtgtacaacgtgc

SEQ ID NO: 1809 - DNA, 20 bp, synthetic construct
  misc_feature 1..20: note = Synthetic Sequence
  source 1..20: mol_type = other DNA
gggcaggagtgggggtcaca

SEQ ID NO: 1810 - DNA, 20 bp, synthetic construct
  misc_feature 1..20: note = Synthetic Sequence
  source 1..20: mol_type = other DNA
tttaagggctcacaactcta

SEQ ID NO: 1811 - DNA, 20 bp, synthetic construct
  misc_feature 1..20: note = Synthetic Sequence
  source 1..20: mol_type = other DNA
agggtcacaagacaattgtg

SEQ ID NO: 1812 - DNA, 20 bp, synthetic construct
  misc_feature 1..20: note = Synthetic Sequence
  source 1..20: mol_type = other DNA
cgagaccatgctggctaaca

SEQ ID NO: 1813 - DNA, 20 bp, synthetic construct
  misc_feature 1..20: note = Synthetic Sequence
  source 1..20: mol_type = other DNA
attcaatcaactggaagaaa

SEQ ID NO: 1814 - DNA, 20 bp, synthetic construct
  misc_feature 1..20: note = Synthetic Sequence
  source 1..20: mol_type = other DNA
caggagaatggtatgaaccc

SEQ ID NO: 1815 - DNA, 20 bp, synthetic construct
  misc_feature 1..20: note = Synthetic Sequence
  source 1..20: mol_type = other DNA
atagaatatcacaaggcaag

SEQ ID NO: 1816 - DNA, 20 bp, synthetic construct
  misc_feature 1..20: note = Synthetic Sequence
  source 1..20: mol_type = other DNA
gcatgagcgacgcagaagac

SEQ ID NO: 1817 - DNA, 20 bp, synthetic construct
  misc_feature 1..20: note = Synthetic Sequence
  source 1..20: mol_type = other DNA
agggacacaaaaactgcgga

SEQ ID NO: 1818 - DNA, 20 bp, synthetic construct
  misc_feature 1..20: note = Synthetic Sequence
  source 1..20: mol_type = other DNA
gctagatacagagtgttgat

SEQ ID NO: 1819 - DNA, 20 bp, synthetic construct
  misc_feature 1..20: note = Synthetic Sequence
  source 1..20: mol_type = other DNA
agggacaggaattgctcact

SEQ ID NO: 1820 - DNA, 20 bp, synthetic construct
  misc_feature 1..20: note = Synthetic Sequence
  source 1..20: mol_type = other DNA
cacttgaacccgggaagtgg

SEQ ID NO: 1821 - DNA, 20 bp, synthetic construct
  misc_feature 1..20: note = Synthetic Sequence
  source 1..20: mol_type = other DNA
gaacacatccgaacatcaga

SEQ ID NO: 1822 - DNA, 20 bp, synthetic construct
  misc_feature 1..20: note = Synthetic Sequence
  source 1..20: mol_type = other DNA
gggacaggaattgctcactc

SEQ ID NO: 1823 - DNA, 20 bp, synthetic construct
  misc_feature 1..20: note = Synthetic Sequence
  source 1..20: mol_type = other DNA
cagtagaatcgcttgaaccc

SEQ ID NO: 1824 - DNA, 20 bp, synthetic construct
  misc_feature 1..20: note = Synthetic Sequence
  source 1..20: mol_type = other DNA
gagaatggcatgaacccaag

SEQ ID NO: 1825 - DNA, 20 bp, synthetic construct
  misc_feature 1..20: note = Synthetic Sequence
  source 1..20: mol_type = other DNA
gaggatggcgtgaacccggg

SEQ ID NO: 1826 - DNA, 20 bp, synthetic construct
  misc_feature 1..20: note = Synthetic Sequence
  source 1..20: mol_type = other DNA
aggaggttgaggcaggagaa

SEQ ID NO: 1827 - DNA, 20 bp, synthetic construct
  misc_feature 1..20: note = Synthetic Sequence
  source 1..20: mol_type = other DNA
cacccatcaacccatcatct

SEQ ID NO: 1828 - DNA, 20 bp, synthetic construct
  misc_feature 1..20: note = Synthetic Sequence
  source 1..20: mol_type = other DNA
caagagaatggcgtgaacct

SEQ ID NO: 1829 - DNA, 20 bp, synthetic construct
  misc_feature 1..20: note = Synthetic Sequence
  source 1..20: mol_type = other DNA
ggagcaagtcatgtcttaca

SEQ ID NO: 1830 - DNA, 20 bp, synthetic construct
  misc_feature 1..20: note = Synthetic Sequence
  source 1..20: mol_type = other DNA
aattagctgggcttggtggt

SEQ ID NO: 1831 - DNA, 20 bp, synthetic construct
  misc_feature 1..20: note = Synthetic Sequence
  source 1..20: mol_type = other DNA
ggagaatcgcttgaaccagg

SEQ ID NO: 1832 - DNA, 20 bp, synthetic construct
  misc_feature 1..20: note = Synthetic Sequence
  source 1..20: mol_type = other DNA
tgaaaagatacccaaaaatg

SEQ ID NO: 1833 - DNA, 20 bp, synthetic construct
  misc_feature 1..20: note = Synthetic Sequence
  source 1..20: mol_type = other DNA
atcacaaggcaagtggaggc

SEQ ID NO: 1834 - DNA, 20 bp, synthetic construct
  misc_feature 1..20: note = Synthetic Sequence
  source 1..20: mol_type = other DNA
ggagaatcgcttgaaccggg

SEQ ID NO: 1835 - DNA, 20 bp, synthetic construct
  misc_feature 1..20: note = Synthetic Sequence
  source 1..20: mol_type = other DNA
tttcaccgcattagccagga

SEQ ID NO: 1836 - DNA, 20 bp, synthetic construct
  misc_feature 1..20: note = Synthetic Sequence
  source 1..20: mol_type = other DNA
tacctatgagtgagaacatg

SEQ ID NO: 1837 - DNA, 20 bp, synthetic construct
  misc_feature 1..20: note = Synthetic Sequence
  source 1..20: mol_type = other DNA
ttgaatctataaattgcttt

SEQ ID NO: 1838 - DNA, 20 bp, synthetic construct
  misc_feature 1..20: note = Synthetic Sequence
  source 1..20: mol_type = other DNA
tcacaaggcaagtggaggca

SEQ ID NO: 1839 - DNA, 20 bp, synthetic construct
  misc_feature 1..20: note = Synthetic Sequence
  source 1..20: mol_type = other DNA
cagtgaagggagataggggt

SEQ ID NO: 1840 - DNA, 20 bp, synthetic construct
  misc_feature 1..20: note = Synthetic Sequence
  source 1..20: mol_type = other DNA
gagaatcgcttgaaaccggg

SEQ ID NO: 1841 - DNA, 20 bp, synthetic construct
  misc_feature 1..20: note = Synthetic Sequence
  source 1..20: mol_type = other DNA
gccagcagtggcaacccgct

SEQ ID NO: 1842 - DNA, 20 bp, synthetic construct
  misc_feature 1..20: note = Synthetic Sequence
  source 1..20: mol_type = other DNA
ctcaggtgatccgtccacct

SEQ ID NO: 1843 - DNA, 20 bp, synthetic construct
  misc_feature 1..20: note = Synthetic Sequence
  source 1..20: mol_type = other DNA
ttaagggctcacaactctaa

SEQ ID NO: 1844 - DNA, 20 bp, synthetic construct
  misc_feature 1..20: note = Synthetic Sequence
  source 1..20: mol_type = other DNA
caagaccagccaggccaaca

SEQ ID NO: 1845 - DNA, 20 bp, synthetic construct
  misc_feature 1..20: note = Synthetic Sequence
  source 1..20: mol_type = other DNA
ctgaggaggcctcacaatca

SEQ ID NO: 1846 - DNA, 20 bp, synthetic construct
  misc_feature 1..20: note = Synthetic Sequence
  source 1..20: mol_type = other DNA
ttattaatcccttgtcagat

SEQ ID NO: 1847 - DNA, 20 bp, synthetic construct
  misc_feature 1..20: note = Synthetic Sequence
  source 1..20: mol_type = other DNA
gccgaggcggacggatcacg

SEQ ID NO: 1848 - DNA, 20 bp, synthetic construct
  misc_feature 1..20: note = Synthetic Sequence
  source 1..20: mol_type = other DNA
agtgaagggagataggggtg

SEQ ID NO: 1849 - DNA, 20 bp, synthetic construct
  misc_feature 1..20: note = Synthetic Sequence
  source 1..20: mol_type = other DNA
cttggaggttagaagcaaga

SEQ ID NO: 1850 - DNA, 20 bp, synthetic construct
  misc_feature 1..20: note = Synthetic Sequence
  source 1..20: mol_type = other DNA
aaaaactgcggaaggccgca

SEQ ID NO: 1851 - DNA, 20 bp, synthetic construct
  misc_feature 1..20: note = Synthetic Sequence
  source 1..20: mol_type = other DNA
caaaaactgcggaaggccgc

SEQ ID NO: 1852 - DNA, 20 bp, synthetic construct
  misc_feature 1..20: note = Synthetic Sequence
  source 1..20: mol_type = other DNA
tttaagttccttgtagactc

SEQ ID NO: 1853 - DNA, 20 bp, synthetic construct
  misc_feature 1..20: note = Synthetic Sequence
  source 1..20: mol_type = other DNA
tcagtgaagggagatagggg

SEQ ID NO: 1854 - DNA, 20 bp, synthetic construct
  misc_feature 1..20: note = Synthetic Sequence
  source 1..20: mol_type = other DNA
gaaggatggttaccagaggc

SEQ ID NO: 1855 - DNA, 20 bp, synthetic construct
  misc_feature 1..20: note = Synthetic Sequence
  source 1..20: mol_type = other DNA
aggcacttcttacatggtgg

SEQ ID NO: 1856 - DNA, 20 bp, synthetic construct
  misc_feature 1..20: note = Synthetic Sequence
  source 1..20: mol_type = other DNA
gagaattgcttgaaaccagg

SEQ ID NO: 1857 - DNA, 20 bp, synthetic construct
  misc_feature 1..20: note = Synthetic Sequence
  source 1..20: mol_type = other DNA
catgtatacatgtgccatgt

SEQ ID NO: 1858 - DNA, 20 bp, synthetic construct
  misc_feature 1..20: note = Synthetic Sequence
  source 1..20: mol_type = other DNA
cgcttgaaccggggaggcag

SEQ ID NO: 1859 - DNA, 20 bp, synthetic construct
  misc_feature 1..20: note = Synthetic Sequence
  source 1..20: mol_type = other DNA
atgagttcatgttctttgta

SEQ ID NO: 1860 - DNA, 20 bp, synthetic construct
  misc_feature 1..20: note = Synthetic Sequence
  source 1..20: mol_type = other DNA
aagaatcaatatcattaaaa

SEQ ID NO: 1861 - DNA, 20 bp, synthetic construct
  misc_feature 1..20: note = Synthetic Sequence
  source 1..20: mol_type = other DNA
gagacaggatttcaccatat

SEQ ID NO: 1862 - DNA, 20 bp, synthetic construct
  misc_feature 1..20: note = Synthetic Sequence
  source 1..20: mol_type = other DNA
gtgacggggtttcaccatgt

SEQ ID NO: 1863 - DNA, 20 bp, synthetic construct
  misc_feature 1..20: note = Synthetic Sequence
  source 1..20: mol_type = other DNA
tccgaaaagagagtcagtga

SEQ ID NO: 1864 - DNA, 20 bp, synthetic construct
  misc_feature 1..20: note = Synthetic Sequence
  source 1..20: mol_type = other DNA
gaggagaatcacttgaacct

SEQ ID NO: 1865 - DNA, 20 bp, synthetic construct
  misc_feature 1..20: note = Synthetic Sequence
  source 1..20: mol_type = other DNA
gccgaggcgggcgaatcacg

SEQ ID NO: 1866 - DNA, 20 bp, synthetic construct
  misc_feature 1..20: note = Synthetic Sequence
  source 1..20: mol_type = other DNA
ggtggagagaaacataaatc

SEQ ID NO: 1867 - DNA, 20 bp, synthetic construct
  misc_feature 1..20: note = Synthetic Sequence
  source 1..20: mol_type = other DNA
gaacaataaggtccaggctg

SEQ ID NO: 1868 - DNA, 20 bp, synthetic construct
  misc_feature 1..20: note = Synthetic Sequence
  source 1..20: mol_type = other DNA
ccgaaaagagagtcagtgaa

SEQ ID NO: 1869 - DNA, 20 bp, synthetic construct
  misc_feature 1..20: note = Synthetic Sequence
  source 1..20: mol_type = other DNA
caagagaagagagcttgtgc

SEQ ID NO: 1870 - DNA, 20 bp, synthetic construct
  misc_feature 1..20: note = Synthetic Sequence
  source 1..20: mol_type = other DNA
cagactgaaggctgcactgt

SEQ ID NO: 1871 - DNA, 20 bp, synthetic construct
  misc_feature 1..20: note = Synthetic Sequence
  source 1..20: mol_type = other DNA
gagtcagcaaagggagatag

SEQ ID NO: 1872 - DNA, 20 bp, synthetic construct
  misc_feature 1..20: note = Synthetic Sequence
  source 1..20: mol_type = other DNA
cagctgatccatcaagtgca

SEQ ID NO: 1873 - DNA, 20 bp, synthetic construct
  misc_feature 1..20: note = Synthetic Sequence
  source 1..20: mol_type = other DNA
gagacggggtttcgccacgt

SEQ ID NO: 1874 - DNA, 20 bp, synthetic construct
  misc_feature 1..20: note = Synthetic Sequence
  source 1..20: mol_type = other DNA
ccaccagaaggaagaaactc

SEQ ID NO: 1875 - DNA, 20 bp, synthetic construct
  misc_feature 1..20: note = Synthetic Sequence
  source 1..20: mol_type = other DNA
agaacatatggacacaggaa

SEQ ID NO: 1876 - DNA, 20 bp, synthetic construct
  misc_feature 1..20: note = Synthetic Sequence
  source 1..20: mol_type = other DNA
gatgagttcatgttctttgt

SEQ ID NO: 1877 - DNA, 20 bp, synthetic construct
  misc_feature 1..20: note = Synthetic Sequence
  source 1..20: mol_type = other DNA
atagaaacaatgcttatcac

SEQ ID NO: 1878 - DNA, 20 bp, synthetic construct
  misc_feature 1..20: note = Synthetic Sequence
  source 1..20: mol_type = other DNA
gatacatgtgcaggatgtgc

SEQ ID NO: 1879 - DNA, 20 bp, synthetic construct
  misc_feature 1..20: note = Synthetic Sequence
  source 1..20: mol_type = other DNA
atcacaggaccacaggaccg

SEQ ID NO: 1880 - DNA, 20 bp, synthetic construct
  misc_feature 1..20: note = Synthetic Sequence
  source 1..20: mol_type = other DNA
tattcacaatagccaagatt

SEQ ID NO: 1881 - DNA, 20 bp, synthetic construct
  misc_feature 1..20: note = Synthetic Sequence
  source 1..20: mol_type = other DNA
gggaagggccccctgtccag

SEQ ID NO: 1882 - DNA, 20 bp, synthetic construct
  misc_feature 1..20: note = Synthetic Sequence
  source 1..20: mol_type = other DNA
aatgacgtgaacccaggagg

SEQ ID NO: 1883 - DNA, 20 bp, synthetic construct
  misc_feature 1..20: note = Synthetic Sequence
  source 1..20: mol_type = other DNA
gcaggagaatggtatgaacc

SEQ ID NO: 1884 - DNA, 20 bp, synthetic construct
  misc_feature 1..20: note = Synthetic Sequence
  source 1..20: mol_type = other DNA
gaatatcacaaggcaagtgg

SEQ ID NO: 1885 - DNA, 20 bp, synthetic construct
  misc_feature 1..20: note = Synthetic Sequence
  source 1..20: mol_type = other DNA
tataggatttgggtaggtag

SEQ ID NO: 1886 - DNA, 20 bp, synthetic construct
  misc_feature 1..20: note = Synthetic Sequence
  source 1..20: mol_type = other DNA
cgcgccacagcactcccgcc

SEQ ID NO: 1887 - DNA, 20 bp, synthetic construct
  misc_feature 1..20: note = Synthetic Sequence
  source 1..20: mol_type = other DNA
tcgcccaggcgggagtgctg

SEQ ID NO: 1888 - DNA, 20 bp, synthetic construct
  misc_feature 1..20: note = Synthetic Sequence
  source 1..20: mol_type = other DNA
gaacatatggacacaggaag

SEQ ID NO: 1889 - DNA, 20 bp, synthetic construct
  misc_feature 1..20: note = Synthetic Sequence
  source 1..20: mol_type = other DNA
gtaagtctcatgagatctga

SEQ ID NO: 1890 - DNA, 20 bp, synthetic construct
  misc_feature 1..20: note = Synthetic Sequence
  source 1..20: mol_type = other DNA
gtaaactagttcagccattg

SEQ ID NO: 1891 - DNA, 20 bp, synthetic construct
  misc_feature 1..20: note = Synthetic Sequence
  source 1..20: mol_type = other DNA
gcaggagaattgcatgaacc

SEQ ID NO: 1892 - DNA, 20 bp, synthetic construct
  misc_feature 1..20: note = Synthetic Sequence
  source 1..20: mol_type = other DNA
tgatatgaacaataaggtcc

SEQ ID NO: 1893 - DNA, 20 bp, synthetic construct
  misc_feature 1..20: note = Synthetic Sequence
  source 1..20: mol_type = other DNA
tttcttagtacataacaaaa

SEQ ID NO: 1894 - DNA, 20 bp, synthetic construct
  misc_feature 1..20: note = Synthetic Sequence
  source 1..20: mol_type = other DNA
gcgccacagcactcccgcct

SEQ ID NO: 1895 - DNA, 20 bp, synthetic construct
  misc_feature 1..20: note = Synthetic Sequence
  source 1..20: mol_type = other DNA
gagaacatatggacacagga

SEQ ID NO: 1896 - DNA, 20 bp, synthetic construct
  misc_feature 1..20: note = Synthetic Sequence
  source 1..20: mol_type = other DNA
aagagaagagagcttgtgca

SEQ ID NO: 1897 - DNA, 20 bp, synthetic construct
  misc_feature 1..20: note = Synthetic Sequence
  source 1..20: mol_type = other DNA
cttcatctatgtccctacaa

SEQ ID NO: 1898 - DNA, 20 bp, synthetic construct
  misc_feature 1..20: note = Synthetic Sequence
  source 1..20: mol_type = other DNA
atttaagaaatacattggtt

SEQ ID NO: 1899 - DNA, 20 bp, synthetic construct
  misc_feature 1..20: note = Synthetic Sequence
  source 1..20: mol_type = other DNA
cactaccacaagaacagtat

SEQ ID NO: 1900 - DNA, 20 bp, synthetic construct
  misc_feature 1..20: note = Synthetic Sequence
  source 1..20: mol_type = other DNA
ggtaggtaaaggaaaaaggg

SEQ ID NO: 1901 - DNA, 20 bp, synthetic construct
  misc_feature 1..20: note = Synthetic Sequence
  source 1..20: mol_type = other DNA
cctgcacttgatggatcagc

SEQ ID NO: 1902 - DNA, 20 bp, synthetic construct
  misc_feature 1..20: note = Synthetic Sequence
  source 1..20: mol_type = other DNA
agccattcaacaagtctcta

SEQ ID NO: 1903 - DNA, 20 bp, synthetic construct
  misc_feature 1..20: note = Synthetic Sequence
  source 1..20: mol_type = other DNA
catgagcgatctgtgcctta

SEQ ID NO: 1904 - DNA, 20 bp, synthetic construct
  misc_feature 1..20: note = Synthetic Sequence
  source 1..20: mol_type = other DNA
ctcaggtgatccgtctgcct

SEQ ID NO: 1905 - DNA, 20 bp, synthetic construct
  misc_feature 1..20: note = Synthetic Sequence
  source 1..20: mol_type = other DNA
gagaatggcgtgaacctgag

SEQ ID NO: 1906 - DNA, 20 bp, synthetic construct
  misc_feature 1..20: note = Synthetic Sequence
  source 1..20: mol_type = other DNA
tggaccaatcagcaggacat

SEQ ID NO: 1907 - DNA, 20 bp, synthetic construct
  misc_feature 1..20: note = Synthetic Sequence
  source 1..20: mol_type = other DNA
ctccctagagacttgttgaa

SEQ ID NO: 1908 - DNA, 20 bp, synthetic construct
  misc_feature 1..20: note = Synthetic Sequence
  source 1..20: mol_type = other DNA
tgtagggacatagatgaagc

SEQ ID NO: 1909 - DNA, 20 bp, synthetic construct
  misc_feature 1..20: note = Synthetic Sequence
  source 1..20: mol_type = other DNA
gcagtagaatcgcttgaacc

SEQ ID NO: 1910 - DNA, 20 bp, synthetic construct
  misc_feature 1..20: note = Synthetic Sequence
  source 1..20: mol_type = other DNA
ataaaggaatacctgaggct

SEQ ID NO: 1911 - DNA, 20 bp, synthetic construct
  misc_feature 1..20: note = Synthetic Sequence
  source 1..20: mol_type = other DNA
atggaccaatcagcaggaca

SEQ ID NO: 1912 - DNA, 20 bp, synthetic construct
  misc_feature 1..20: note = Synthetic Sequence
  source 1..20: mol_type = other DNA
ttgttgattgatgggcattt

SEQ ID NO: 1913 - DNA, 20 bp, synthetic construct
  misc_feature 1..20: note = Synthetic Sequence
  source 1..20: mol_type = other DNA
gtgtggaaggggacccgagc

SEQ ID NO: 1914 - DNA, 20 bp, synthetic construct
  misc_feature 1..20: note = Synthetic Sequence
  source 1..20: mol_type = other DNA
tataaaggaatacctgaggc

SEQ ID NO: 1915 - DNA, 20 bp, synthetic construct
  misc_feature 1..20: note = Synthetic Sequence
  source 1..20: mol_type = other DNA
tcactaccacaagaacagta

SEQ ID NO: 1916 - DNA, 20 bp, synthetic construct
  misc_feature 1..20: note = Synthetic Sequence
  source 1..20: mol_type = other DNA
aatgaacaaggacagcttgg

SEQ ID NO: 1917 - DNA, 20 bp, synthetic construct
  misc_feature 1..20: note = Synthetic Sequence
  source 1..20: mol_type = other DNA
gagactcacttgaacctggg

SEQ ID NO: 1918 - DNA, 20 bp, synthetic construct
  misc_feature 1..20: note = Synthetic Sequence
  source 1..20: mol_type = other DNA
agcactttgcgaggccgagg

SEQ ID NO: 1919 - DNA, 20 bp, synthetic construct
  misc_feature 1..20: note = Synthetic Sequence
  source 1..20: mol_type = other DNA
tgaagcgggtggatcacctg

SEQ ID NO: 1920 - DNA, 20 bp, synthetic construct
  misc_feature 1..20: note = Synthetic Sequence
  source 1..20: mol_type = other DNA
gggccatggtcactcatatt

SEQ ID NO: 1921 - DNA, 20 bp, synthetic construct
  misc_feature 1..20: note = Synthetic Sequence
  source 1..20: mol_type = other DNA
aatggcatgaacccaagagg

SEQ ID NO: 1922 - DNA, 20 bp, synthetic construct
  misc_feature 1..20: note = Synthetic Sequence
  source 1..20: mol_type = other DNA
agtgggagcccaggcagggg

SEQ ID NO: 1923 - DNA, 20 bp, synthetic construct
  misc_feature 1..20: note = Synthetic Sequence
  source 1..20: mol_type = other DNA
aagaatggtgtgaacccggg

SEQ ID NO: 1924 - DNA, 20 bp, synthetic construct
  misc_feature 1..20: note = Synthetic Sequence
  source 1..20: mol_type = other DNA
tcctgaatacagcacattga

SEQ ID NO: 1925 - DNA, 20 bp, synthetic construct
  misc_feature 1..20: note = Synthetic Sequence
  source 1..20: mol_type = other DNA
ggtacatgtacacaatgtgc

SEQ ID NO: 1926 - DNA, 20 bp, synthetic construct
  misc_feature 1..20: note = Synthetic Sequence
  source 1..20: mol_type = other DNA
aggaagggctttattcagct

SEQ ID NO: 1927 - DNA, 20 bp, synthetic construct
  misc_feature 1..20: note = Synthetic Sequence
  source 1..20: mol_type = other DNA
ttaatcacctgggtgcaggt

SEQ ID NO: 1928 - DNA, 20 bp, synthetic construct
  misc_feature 1..20: note = Synthetic Sequence
  source 1..20: mol_type = other DNA
cgggagaatggcgtgaacct

SEQ ID NO: 1929 - DNA, 20 bp, synthetic construct
  misc_feature 1..20: note = Synthetic Sequence
  source 1..20: mol_type = other DNA
tgtagtcgcagctactcggg

SEQ ID NO: 1930 - DNA, 20 bp, synthetic construct
  misc_feature 1..20: note = Synthetic Sequence
  source 1..20: mol_type = other DNA
caggagaatagtgtgaaccc

SEQ ID NO: 1931 - DNA, 20 bp, synthetic construct
  misc_feature 1..20: note = Synthetic Sequence
  source 1..20: mol_type = other DNA
ccgagactgggaagaaaaag

SEQ ID NO: 1932 - DNA, 20 bp, synthetic construct
  misc_feature 1..20: note = Synthetic Sequence
  source 1..20: mol_type = other DNA
aaccattcactcccctggaa

SEQ ID NO: 1933 - DNA, 20 bp, synthetic construct
  misc_feature 1..20: note = Synthetic Sequence
  source 1..20: mol_type = other DNA
agggccaccagagggctcct

SEQ ID NO: 1934 - DNA, 20 bp, synthetic construct
  misc_feature 1..20: note = Synthetic Sequence
  source 1..20: mol_type = other DNA
gccgaggcgggcggatcacc

SEQ ID NO: 1935 - DNA, 20 bp, synthetic construct
  misc_feature 1..20: note = Synthetic Sequence
  source 1..20: mol_type = other DNA
acaatgagaacacatggaca

SEQ ID NO: 1936 - DNA, 20 bp, synthetic construct
  misc_feature 1..20: note = Synthetic Sequence
  source 1..20: mol_type = other DNA
cgggagaatggcatgaaccc

SEQ ID NO: 1937 - DNA, 20 bp, synthetic construct
  misc_feature 1..20: note = Synthetic Sequence
  source 1..20: mol_type = other DNA
cattcactcccctggaaagg

SEQ ID NO: 1938 - DNA, 20 bp, synthetic construct
  misc_feature 1..20: note = Synthetic Sequence
  source 1..20: mol_type = other DNA
aaggaagggctttattcagc

SEQ ID NO: 1939 - DNA, 20 bp, synthetic construct
  misc_feature 1..20: note = Synthetic Sequence
  source 1..20: mol_type = other DNA
gaatcatggcaggaggtgaa

SEQ ID NO: 1940 - DNA, 20 bp, synthetic construct
  misc_feature 1..20: note = Synthetic Sequence
  source 1..20: mol_type = other DNA
ttgagaccatcctggctaac

SEQ ID NO: 1941 - DNA, 20 bp, synthetic construct
  misc_feature 1..20: note = Synthetic Sequence
  source 1..20: mol_type = other DNA
aatacatttaagaaatacat

SEQ ID NO: 1942 - DNA, 20 bp, synthetic construct
  misc_feature 1..20: note = Synthetic Sequence
  source 1..20: mol_type = other DNA
cctatcagtgtgctgtattc

SEQ ID NO: 1943 - DNA, 20 bp, synthetic construct
  misc_feature 1..20: note = Synthetic Sequence
  source 1..20: mol_type = other DNA
cgcttgagcccgggaggcag

SEQ ID NO: 1944 - DNA, 20 bp, synthetic construct
  misc_feature 1..20: note = Synthetic Sequence
  source 1..20: mol_type = other DNA
cacttgaaccagggagtcag

SEQ ID NO: 1945 - DNA, 20 bp, synthetic construct
  misc_feature 1..20: note = Synthetic Sequence
  source 1..20: mol_type = other DNA
atgaggtgagatggtcacat

SEQ ID NO: 1946 - DNA, 20 bp, synthetic construct
  misc_feature 1..20: note = Synthetic Sequence
  source 1..20: mol_type = other DNA
tgcttgaacccgagaggcgg

SEQ ID NO: 1947 - DNA, 20 bp, synthetic construct
  misc_feature 1..20: note = Synthetic Sequence
  source 1..20: mol_type = other DNA
cctgaatacagcacattgat

SEQ ID NO: 1948 - DNA, 20 bp, synthetic construct
  misc_feature 1..20: note = Synthetic Sequence
  source 1..20: mol_type = other DNA
aggaatgaacaaggacagct

SEQ ID NO: 1949 - DNA, 20 bp, synthetic construct
  misc_feature 1..20: note = Synthetic Sequence
  source 1..20: mol_type = other DNA
acacaccagggcctgtcatg

SEQ ID NO: 1950 - DNA, 20 bp, synthetic construct
  misc_feature 1..20: note = Synthetic Sequence
  source 1..20: mol_type = other DNA
tgatagtgatatgaacaata

SEQ ID NO: 1951 - DNA, 20 bp, synthetic construct
  misc_feature 1..20: note = Synthetic Sequence
  source 1..20: mol_type = other DNA
catagtctcatatttcttgg

SEQ ID NO: 1952 - DNA, 20 bp, synthetic construct
  misc_feature 1..20: note = Synthetic Sequence
  source 1..20: mol_type = other DNA
agtcacttgaacctgggagg

SEQ ID NO: 1953 - DNA, 20 bp, synthetic construct
  misc_feature 1..20: note = Synthetic Sequence
  source 1..20: mol_type = other DNA
caggcagatcgcttgagccc

SEQ ID NO: 1954 - DNA, 20 bp, synthetic construct
  misc_feature 1..20: note = Synthetic Sequence
  source 1..20: mol_type = other DNA
gtgaggcttccccagccacg

SEQ ID NO: 1955 - DNA, 20 bp, synthetic construct
  misc_feature 1..20: note = Synthetic Sequence
  source 1..20: mol_type = other DNA
tatgtatacatgtaccatgt

SEQ ID NO: 1956 - DNA, 20 bp, synthetic construct
  misc_feature 1..20: note = Synthetic Sequence
  source 1..20: mol_type = other DNA
tcaggagctcgagaccatcc

SEQ ID NO: 1957 - DNA, 20 bp, synthetic construct
  misc_feature 1..20: note = Synthetic Sequence
  source 1..20: mol_type = other DNA
gcaggagaatctcttgaact

SEQ ID NO: 1958 - DNA, 20 bp, synthetic construct
  misc_feature 1..20: note = Synthetic Sequence
  source 1..20: mol_type = other DNA
tagaccaaggagccctctgg

SEQ ID NO: 1959 - DNA, 20 bp, synthetic construct
  misc_feature 1..20: note = Synthetic Sequence
  source 1..20: mol_type = other DNA
aattgaacaacgagaacaca

SEQ ID NO: 1960 - DNA, 20 bp, synthetic construct
  misc_feature 1..20: note = Synthetic Sequence
  source 1..20: mol_type = other DNA
taaggcaggtggatcacctg

SEQ ID NO: 1961 - DNA, 20 bp, synthetic construct
  misc_feature 1..20: note = Synthetic Sequence
  source 1..20: mol_type = other DNA
caggagaatgacttgaaccc

SEQ ID NO: 1962 - DNA, 20 bp, synthetic construct
  misc_feature 1..20: note = Synthetic Sequence
  source 1..20: mol_type = other DNA
cagagggctccttggtctag

SEQ ID NO: 1963 - DNA, 20 bp, synthetic construct
  misc_feature 1..20: note = Synthetic Sequence
  source 1..20: mol_type = other DNA
ggcaggcggatcacgagatc

SEQ ID NO: 1964 - DNA, 20 bp, synthetic construct
  misc_feature 1..20: note = Synthetic Sequence
  source 1..20: mol_type = other DNA
gagaatggcgtgaacccaag

SEQ ID NO: 1965 - DNA, 20 bp, synthetic construct
  misc_feature 1..20: note = Synthetic Sequence
  source 1..20: mol_type = other DNA
tatgaggtgagatggtcaca

SEQ ID NO: 1966 - DNA, 20 bp, synthetic construct
  misc_feature 1..20: note = Synthetic Sequence
  source 1..20: mol_type = other DNA
tcccgagtagctgcgactac

SEQ ID NO: 1967 - DNA, 20 bp, synthetic construct
  misc_feature 1..20: note = Synthetic Sequence
  source 1..20: mol_type = other DNA
cgtatgttctcactcataag

SEQ ID NO: 1968 - DNA, 20 bp, synthetic construct
  misc_feature 1..20: note = Synthetic Sequence
  source 1..20: mol_type = other DNA
tcccagctcctgggggctcc

SEQ ID NO: 1969 - DNA, 20 bp, synthetic construct
  misc_feature 1..20: note = Synthetic Sequence
  source 1..20: mol_type = other DNA
cgcttgaacccggaaggtgg

SEQ ID NO: 1970 - DNA, 20 bp, synthetic construct
  misc_feature 1..20: note = Synthetic Sequence
  source 1..20: mol_type = other DNA
agaacaaagcttccacagcg

SEQ ID NO: 1971 - DNA, 20 bp, synthetic construct
  misc_feature 1..20: note = Synthetic Sequence
  source 1..20: mol_type = other DNA
tccgtgaggccaagaacccc

SEQ ID NO: 1972 - DNA, 20 bp, synthetic construct
  misc_feature 1..20: note = Synthetic Sequence
  source 1..20: mol_type = other DNA
cgagaccagcctggtcaata

SEQ ID NO: 1973 - DNA, 20 bp, synthetic construct
  misc_feature 1..20: note = Synthetic Sequence
  source 1..20: mol_type = other DNA
atggcgattattaaaaagtc

SEQ ID NO: 1974 - DNA, 20 bp, synthetic construct
  misc_feature 1..20: note = Synthetic Sequence
  source 1..20: mol_type = other DNA
gcaggagaatggcgtgaacg

SEQ ID NO: 1975 - DNA, 20 bp, synthetic construct
  misc_feature 1..20: note = Synthetic Sequence
  source 1..20: mol_type = other DNA
tataaagatacctgaaaatg

SEQ ID NO: 1976 - DNA, 20 bp, synthetic construct
  misc_feature 1..20: note = Synthetic Sequence
  source 1..20: mol_type = other DNA
gaatatttatgcctgattca

SEQ ID NO: 1977 - DNA, 20 bp, synthetic construct
  misc_feature 1..20: note = Synthetic Sequence
  source 1..20: mol_type = other DNA
ccattcactcccctggaaag

SEQ ID NO: 1978 - DNA, 20 bp, synthetic construct
  misc_feature 1..20: note = Synthetic Sequence
  source 1..20: mol_type = other DNA
tcaggagatcaagaccgtcc

SEQ ID NO: 1979 - DNA, 20 bp, synthetic construct
  misc_feature 1..20: note = Synthetic Sequence
  source 1..20: mol_type = other DNA
ccccaggagctgggagaggc

SEQ ID NO: 1980 - DNA, 20 bp, synthetic construct
  misc_feature 1..20: note = Synthetic Sequence
  source 1..20: mol_type = other DNA
aattgaacaatgagaacata

SEQ ID NO: 1981 - DNA, 20 bp, synthetic construct
  misc_feature 1..20: note = Synthetic Sequence
  source 1..20: mol_type = other DNA
gtaaatggtgctgggaaaac

SEQ ID NO: 1982 - DNA, 20 bp, synthetic construct
  misc_feature 1..20: note = Synthetic Sequence
  source 1..20: mol_type = other DNA
agaatggcgtgaacccggga

SEQ ID NO: 1983 - DNA, 20 bp, synthetic construct
  misc_feature 1..20: note = Synthetic Sequence
  source 1..20: mol_type = other DNA
caggagaatagcgtgaacct

SEQ ID NO: 1984 - DNA, 20 bp, synthetic construct
  misc_feature 1..20: note = Synthetic Sequence
  source 1..20: mol_type = other DNA
aatgtgaaataagcacatca

SEQ ID NO: 1985 - DNA, 20 bp, synthetic construct
  misc_feature 1..20: note = Synthetic Sequence
  source 1..20: mol_type = other DNA
gtaacttcctgacattgcca

SEQ ID NO: 1986 - DNA, 20 bp, synthetic construct
  misc_feature 1..20: note = Synthetic Sequence
  source 1..20: mol_type = other DNA
cgggaccatcctggctaaca

SEQ ID NO: 1987 - DNA, 20 bp, synthetic construct
  misc_feature 1..20: note = Synthetic Sequence
  source 1..20: mol_type = other DNA
cacaggctgtacaggaagca

SEQ ID NO: 1988 - DNA, 20 bp, synthetic construct
  misc_feature 1..20: note = Synthetic Sequence
  source 1..20: mol_type = other DNA
tcctcaaatgccaccaaagt

SEQ ID NO: 1989 - DNA, 20 bp, synthetic construct
  misc_feature 1..20: note = Synthetic Sequence
  source 1..20: mol_type = other DNA
gaaaaaggggggttgttctc

SEQ ID NO: 1990 - DNA, 20 bp, synthetic construct
  misc_feature 1..20: note = Synthetic Sequence
  source 1..20: mol_type = other DNA
cccatcaatgtgctgtattc

SEQ ID NO: 1991 - DNA, 20 bp, synthetic construct
  misc_feature 1..20: note = Synthetic Sequence
  source 1..20: mol_type = other DNA
ggctgaggcaggagaatggt

SEQ ID NO: 1992 - DNA, 20 bp, synthetic construct
  misc_feature 1..20: note = Synthetic Sequence
  source 1..20: mol_type = other DNA
gggtggatcacgaggtcagg

SEQ ID NO: 1993 - DNA, 20 bp, synthetic construct
  misc_feature 1..20: note = Synthetic Sequence
  source 1..20: mol_type = other DNA
accattcactcccctggaaa

SEQ ID NO: 1994 - DNA, 20 bp, synthetic construct
  misc_feature 1..20: note = Synthetic Sequence
  source 1..20: mol_type = other DNA
tcccactttggtggcatttg

SEQ ID NO: 1995 - DNA, 20 bp, synthetic construct
  misc_feature 1..20: note = Synthetic Sequence
  source 1..20: mol_type = other DNA
actaggggagggatagcatt

SEQ ID NO: 1996 - DNA, 20 bp, synthetic construct
  misc_feature 1..20: note = Synthetic Sequence
  source 1..20: mol_type = other DNA
ataataatcaataaaaactg

SEQ ID NO: 1997 - DNA, 20 bp, synthetic construct
  misc_feature 1..20: note = Synthetic Sequence
  source 1..20: mol_type = other DNA
aggagctgggagaggcagga

SEQ ID NO: 1998 - DNA, 20 bp, synthetic construct
  misc_feature 1..20: note = Synthetic Sequence
  source 1..20: mol_type = other DNA
ccaaagtgggagcccaggca

SEQ ID NO: 1999 - DNA, 20 bp, synthetic construct
  misc_feature 1..20: note = Synthetic Sequence
  source 1..20: mol_type = other DNA
tcaggagatcgcgaccatcc

SEQ ID NO: 2000 - DNA, 20 bp, synthetic construct
  misc_feature 1..20: note = Synthetic Sequence
  source 1..20: mol_type = other DNA
ggcaggtggatcacgaagtc

SEQ ID NO: 2001 - DNA, 20 bp, synthetic construct
  misc_feature 1..20: note = Synthetic Sequence
  source 1..20: mol_type = other DNA
tgggtacagtgtacactgct

SEQ ID NO: 2002 - DNA, 20 bp, synthetic construct
  misc_feature 1..20: note = Synthetic Sequence
  source 1..20: mol_type = other DNA
ttaatccagtctattgttgt

SEQ ID NO: 2003 - DNA, 20 bp, synthetic construct
  misc_feature 1..20: note = Synthetic Sequence
  source 1..20: mol_type = other DNA
gaaacggggtttcaccatat

SEQ ID NO: 2004 - DNA, 20 bp, synthetic construct
  misc_feature 1..20: note = Synthetic Sequence
  source 1..20: mol_type = other DNA
caggagaatggcgtgaacgc

SEQ ID NO: 2005 - DNA, 20 bp, synthetic construct
  misc_feature 1..20: note = Synthetic Sequence
  source 1..20: mol_type = other DNA
caaaaatgtggaagtgactt

SEQ ID NO: 2006 - DNA, 20 bp, synthetic construct
  misc_feature 1..20: note = Synthetic Sequence
  source 1..20: mol_type = other DNA
atgggcaaccagcagccctc

SEQ ID NO: 2007 - DNA, 20 bp, synthetic construct
  misc_feature 1..20: note = Synthetic Sequence
  source 1..20: mol_type = other DNA
tgtaggaacatggatgaagc

SEQ ID NO: 2008 - DNA, 20 bp, synthetic construct
  misc_feature 1..20: note = Synthetic Sequence
  source 1..20: mol_type = other DNA
caggagaagggcgtgaaccc

SEQ ID NO: 2009 - DNA, 20 bp, synthetic construct
  misc_feature 1..20: note = Synthetic Sequence
  source 1..20: mol_type = other DNA
gagaatagcgtgaacctggg

SEQ ID NO: 2010 - DNA, 20 bp, synthetic construct
  misc_feature 1..20: note = Synthetic Sequence
  source 1..20: mol_type = other DNA
ctcctcaaatgccaccaaag

SEQ ID NO: 2011 - DNA, 20 bp, synthetic construct
  misc_feature 1..20: note = Synthetic Sequence
  source 1..20: mol_type = other DNA
caaagggaggggacccaaag

SEQ ID NO: 2012 - DNA, 20 bp, synthetic construct
  misc_feature 1..20: note = Synthetic Sequence
  source 1..20: mol_type = other DNA
cgcctgaacccaggaggcgg

SEQ ID NO: 2013 - DNA, 20 bp, synthetic construct
  misc_feature 1..20: note = Synthetic Sequence
  source 1..20: mol_type = other DNA
gggtacagtgtacactgctc

SEQ ID NO: 2014 - DNA, 20 bp, synthetic construct
  misc_feature 1..20: note = Synthetic Sequence
  source 1..20: mol_type = other DNA
ctgatccagaccccaagaga

SEQ ID NO: 2015 - DNA, 20 bp, synthetic construct
  misc_feature 1..20: note = Synthetic Sequence
  source 1..20: mol_type = other DNA
gcaggagaattgcgtgaacc

SEQ ID NO: 2016 - DNA, 20 bp, synthetic construct
  misc_feature 1..20: note = Synthetic Sequence
  source 1..20: mol_type = other DNA
ttgcatcatagacaatgtaa

SEQ ID NO: 2017 - DNA, 20 bp, synthetic construct
  misc_feature 1..20: note = Synthetic Sequence
  source 1..20: mol_type = other DNA
cgctagaccaaggagccctc

SEQ ID NO: 2018 - DNA, 20 bp, synthetic construct
  misc_feature 1..20: note = Synthetic Sequence
  source 1..20: mol_type = other DNA
tacaaaacattagccgggcg

SEQ ID NO: 2019 - DNA, 20 bp, synthetic construct
  misc_feature 1..20: note = Synthetic Sequence
  source 1..20: mol_type = other DNA
caggagaatcgctcgaacct

SEQ ID NO: 2020 - DNA, 20 bp, synthetic construct
  misc_feature 1..20: note = Synthetic Sequence
  source 1..20: mol_type = other DNA
cacttaaacctgggaggcgg

SEQ ID NO: 2021 - DNA, 20 bp, synthetic construct
  misc_feature 1..20: note = Synthetic Sequence
  source 1..20: mol_type = other DNA
taataatcaataaaaactga

SEQ ID NO: 2022 - DNA, 20 bp, synthetic construct
  misc_feature 1..20: note = Synthetic Sequence
  source 1..20: mol_type = other DNA
agcaaggcaccttcttcaca

SEQ ID NO: 2023 - DNA, 20 bp, synthetic construct
  misc_feature 1..20: note = Synthetic Sequence
  source 1..20: mol_type = other DNA
ggaacttaaacaaatttaca

SEQ ID NO: 2024 - DNA, 20 bp, synthetic construct
  misc_feature 1..20: note = Synthetic Sequence
  source 1..20: mol_type = other DNA
ttaagggcttacaactctaa

SEQ ID NO: 2025 - DNA, 20 bp, synthetic construct
  misc_feature 1..20: note = Synthetic Sequence
  source 1..20: mol_type = other DNA
ataaaatatcacaaggcaaa

SEQ ID NO: 2026 - DNA, 20 bp, synthetic construct
  misc_feature 1..20: note = Synthetic Sequence
  source 1..20: mol_type = other DNA
tgtcaggaagttaccctata

SEQ ID NO: 2027 - DNA, 20 bp, synthetic construct
  misc_feature 1..20: note = Synthetic Sequence
  source 1..20: mol_type = other DNA
ccaatccagaccccaagaga

SEQ ID NO: 2028 - DNA, 20 bp, synthetic construct
  misc_feature 1..20: note = Synthetic Sequence
  source 1..20: mol_type = other DNA
tgaaaatgtggaagcgactt

SEQ ID NO: 2029 - DNA, 20 bp, synthetic construct
  misc_feature 1..20: note = Synthetic Sequence
  source 1..20: mol_type = other DNA
gcaggagaatggcatgagcc

SEQ ID NO: 2030 - DNA, 20 bp, synthetic construct
  misc_feature 1..20: note = Synthetic Sequence
  source 1..20: mol_type = other DNA
gtcacgtgtccactggacag

SEQ ID NO: 2031 - DNA, 20 bp, synthetic construct
  misc_feature 1..20: note = Synthetic Sequence
  source 1..20: mol_type = other DNA
caggaaaatggtgtgaaccc

SEQ ID NO: 2032 - DNA, 20 bp, synthetic construct
  misc_feature 1..20: note = Synthetic Sequence
  source 1..20: mol_type = other DNA
tgcctgaacccaggaggcgg

SEQ ID NO: 2033 - DNA, 20 bp, synthetic construct
  misc_feature 1..20: note = Synthetic Sequence
  source 1..20: mol_type = other DNA
cttcatccatgttcctacaa

SEQ ID NO: 2034 - DNA, 20 bp, synthetic construct
  misc_feature 1..20: note = Synthetic Sequence
  source 1..20: mol_type = other DNA
tcactcagttaaggtggggc

SEQ ID NO: 2035 - DNA, 20 bp, synthetic construct
  misc_feature 1..20: note = Synthetic Sequence
  source 1..20: mol_type = other DNA
actgggactggttagacagt

SEQ ID NO: 2036 - DNA, 20 bp, synthetic construct
  misc_feature 1..20: note = Synthetic Sequence
  source 1..20: mol_type = other DNA
tttagggtcatttgattatg

SEQ ID NO: 2037 - DNA, 20 bp, synthetic construct
  misc_feature 1..20: note = Synthetic Sequence
  source 1..20: mol_type = other DNA
cagtggagtaaagaataaca

SEQ ID NO: 2038 - DNA, 20 bp, synthetic construct
  misc_feature 1..20: note = Synthetic Sequence
  source 1..20: mol_type = other DNA
gtctaaaacaccaaaagcag

SEQ ID NO: 2039 - DNA, 20 bp, synthetic construct
  misc_feature 1..20: note = Synthetic Sequence
  source 1..20: mol_type = other DNA
catacataggctcaaaataa

SEQ ID NO: 2040 - DNA, 20 bp, synthetic construct
  misc_feature 1..20: note = Synthetic Sequence
  source 1..20: mol_type = other DNA
aacacatctgaacatcagaa

SEQ ID NO: 2041 - DNA, 20 bp, synthetic construct
  misc_feature 1..20: note = Synthetic Sequence
  source 1..20: mol_type = other DNA
cactgcaagctccatctcct

SEQ ID NO: 2042 - DNA, 20 bp, synthetic construct
  misc_feature 1..20: note = Synthetic Sequence
  source 1..20: mol_type = other DNA
caggcaggtctcgaactcct

SEQ ID NO: 2043 - DNA, 20 bp, synthetic construct
  misc_feature 1..20: note = Synthetic Sequence
  source 1..20: mol_type = other DNA
accaaagtgggagcccaggc

SEQ ID NO: 2044 - DNA, 20 bp, synthetic construct
  misc_feature 1..20: note = Synthetic Sequence
  source 1..20: mol_type = other DNA
gaaaagaaagcttggacata

SEQ ID NO: 2045 - DNA, 20 bp, synthetic construct
  misc_feature 1..20: note = Synthetic Sequence
  source 1..20: mol_type = other DNA
aaatatcacaaggcaaatgg

SEQ ID NO: 2046 - DNA, 20 bp, synthetic construct
  misc_feature 1..20: note = Synthetic Sequence
  source 1..20: mol_type = other DNA
ctcaggtgatcagcccgcct

SEQ ID NO: 2047 - DNA, 20 bp, synthetic construct
  misc_feature 1..20: note = Synthetic Sequence
  source 1..20: mol_type = other DNA
tagaatcgcttgaacccagg

SEQ ID NO: 2048 - DNA, 20 bp, synthetic construct
  misc_feature 1..20: note = Synthetic Sequence
  source 1..20: mol_type = other DNA
ctcaaaggataaatgcttga

SEQ ID NO: 2049 - DNA, 20 bp, synthetic construct
  misc_feature 1..20: note = Synthetic Sequence
  source 1..20: mol_type = other DNA
gctctcaggcaatagatgat

SEQ ID NO: 2050 - DNA, 20 bp, synthetic construct
  misc_feature 1..20: note = Synthetic Sequence
  source 1..20: mol_type = other DNA
cacttgaacccgagaggtgg

SEQ ID NO: 2051 - DNA, 20 bp, synthetic construct
  misc_feature 1..20: note = Synthetic Sequence
  source 1..20: mol_type = other DNA
accaatcagcaggacgtggg

SEQ ID NO: 2052 - DNA, 20 bp, synthetic construct
  misc_feature 1..20: note = Synthetic Sequence
  source 1..20: mol_type = other DNA
ggggtcacaaggtactcagt

SEQ ID NO: 2053 - DNA, 20 bp, synthetic construct
  misc_feature 1..20: note = Synthetic Sequence
  source 1..20: mol_type = other DNA
gagaatcgctcgaacccggg

SEQ ID NO: 2054 - DNA, 20 bp, synthetic construct
  misc_feature 1..20: note = Synthetic Sequence
  source 1..20: mol_type = other DNA
aagatttcaccatgttggcc

SEQ ID NO: 2055 - DNA, 20 bp, synthetic construct
  misc_feature 1..20: note = Synthetic Sequence
  source 1..20: mol_type = other DNA
cctcaggaagcttacaatca

SEQ ID NO: 2056 - DNA, 20 bp, synthetic construct
  misc_feature 1..20: note = Synthetic Sequence
  source 1..20: mol_type = other DNA
ctttattcagctgggagcat

SEQ ID NO: 2057 - DNA, 20 bp, synthetic construct
  misc_feature 1..20: note = Synthetic Sequence
  source 1..20: mol_type = other DNA
ggcaggcagatcacgaagtc

SEQ ID NO: 2058 - DNA, 20 bp, synthetic construct
  misc_feature 1..20: note = Synthetic Sequence
  source 1..20: mol_type = other DNA
ccaatcagcaggacgtgggt

SEQ ID NO: 2059 - DNA, 20 bp, synthetic construct
  misc_feature 1..20: note = Synthetic Sequence
  source 1..20: mol_type = other DNA
atcacaggaccacaggactg

SEQ ID NO: 2060 - DNA, 20 bp, synthetic construct
  misc_feature 1..20: note = Synthetic Sequence
  source 1..20: mol_type = other DNA
gcaggagaagggcgtgaacc

SEQ ID NO: 2061 - DNA, 20 bp, synthetic construct
  misc_feature 1..20: note = Synthetic Sequence
  source 1..20: mol_type = other DNA
gagaatggcatgaatccagg

SEQ ID NO: 2062 - DNA, 20 bp, synthetic construct
  misc_feature 1..20: note = Synthetic Sequence
  source 1..20: mol_type = other DNA
ccaaaaatataaaaattagc

SEQ ID NO: 2063 - DNA, 20 bp, synthetic construct
  misc_feature 1..20: note = Synthetic Sequence
  source 1..20: mol_type = other DNA
agggagtgtgcgaataggtg

SEQ ID NO: 2064 - DNA, 20 bp, synthetic construct
  misc_feature 1..20: note = Synthetic Sequence
  source 1..20: mol_type = other DNA
caggcagatcacccgaggtc

SEQ ID NO: 2065 - DNA, 20 bp, synthetic construct
  misc_feature 1..20: note = Synthetic Sequence
  source 1..20: mol_type = other DNA
cctgcatgtatacatccaga

SEQ ID NO: 2066 - DNA, 20 bp, synthetic construct
  misc_feature 1..20: note = Synthetic Sequence
  source 1..20: mol_type = other DNA
caggagaatggcatgagccc

SEQ ID NO: 2067 - DNA, 20 bp, synthetic construct
  misc_feature 1..20: note = Synthetic Sequence
  source 1..20: mol_type = other DNA
gacagaaccattcactcccc

SEQ ID NO: 2068 - DNA, 20 bp, synthetic construct
  misc_feature 1..20: note = Synthetic Sequence
  source 1..20: mol_type = other DNA
tgtagggacatgggtgaagc

SEQ ID NO: 2069 - DNA, 20 bp, synthetic construct
  misc_feature 1..20: note = Synthetic Sequence
  source 1..20: mol_type = other DNA
caggaaaatggcgtgaacct

SEQ ID NO: 2070 - DNA, 20 bp, synthetic construct
  misc_feature 1..20: note = Synthetic Sequence
  source 1..20: mol_type = other DNA
gagaattccttgaacccagg

SEQ ID NO: 2071 - DNA, 20 bp, synthetic construct
  misc_feature 1..20: note = Synthetic Sequence
  source 1..20: mol_type = other DNA
tctgtaagagggaaggcaaa

SEQ ID NO: 2072 - DNA, 20 bp, synthetic construct
  misc_feature 1..20: note = Synthetic Sequence
  source 1..20: mol_type = other DNA
tctaatatccagagtctaca

SEQ ID NO: 2073 - DNA, 20 bp, synthetic construct
  misc_feature 1..20: note = Synthetic Sequence
  source 1..20: mol_type = other DNA
cccacccacgtcctgctgat

SEQ ID NO: 2074 - DNA, 20 bp, synthetic construct
  misc_feature 1..20: note = Synthetic Sequence
  source 1..20: mol_type = other DNA
caccagggcctgtcatgggg

SEQ ID NO: 2075 - DNA, 20 bp, synthetic construct
  misc_feature 1..20: note = Synthetic Sequence
  source 1..20: mol_type = other DNA
caatcagcaggacgtgggtg

SEQ ID NO: 2076 - DNA, 20 bp, synthetic construct
  misc_feature 1..20: note = Synthetic Sequence
  source 1..20: mol_type = other DNA
gagacggggattcaccatgt

SEQ ID NO: 2077 - DNA, 20 bp, synthetic construct
  misc_feature 1..20: note = Synthetic Sequence
  source 1..20: mol_type = other DNA
cctcacccaggaagcacaag

SEQ ID NO: 2078 - DNA, 20 bp, synthetic construct
  misc_feature 1..20: note = Synthetic Sequence
  source 1..20: mol_type = other DNA
gagacaagatttcaccatgt

SEQ ID NO: 2079 - DNA, 20 bp, synthetic construct
  misc_feature 1..20: note = Synthetic Sequence
  source 1..20: mol_type = other DNA
ccatgattgtaagcttcctg

SEQ ID NO: 2080 - DNA, 20 bp, synthetic construct
  misc_feature 1..20: note = Synthetic Sequence
  source 1..20: mol_type = other DNA
catttgattatgaggtgaga

SEQ ID NO: 2081 - DNA, 20 bp, synthetic construct
  misc_feature 1..20: note = Synthetic Sequence
  source 1..20: mol_type = other DNA
aggggagggagtgtgcgaat

SEQ ID NO: 2082 - DNA, 20 bp, synthetic construct
  misc_feature 1..20: note = Synthetic Sequence
  source 1..20: mol_type = other DNA
gcctggagcccccaggagct

SEQ ID NO: 2083 - DNA, 20 bp, synthetic construct
  misc_feature 1..20: note = Synthetic Sequence
  source 1..20: mol_type = other DNA
accgaggcgggcggatcacg

SEQ ID NO: 2084 - DNA, 20 bp, synthetic construct
  misc_feature 1..20: note = Synthetic Sequence
  source 1..20: mol_type = other DNA
cttcacccatgtccctacaa

SEQ ID NO: 2085 - DNA, 20 bp, synthetic construct
  misc_feature 1..20: note = Synthetic Sequence
  source 1..20: mol_type = other DNA
tctattgttgttggacattt

SEQ ID NO: 2086 - DNA, 20 bp, synthetic construct
  misc_feature 1..20: note = Synthetic Sequence
  source 1..20: mol_type = other DNA
cactatcatgagaatagcac

SEQ ID NO: 2087 - DNA, 20 bp, synthetic construct
  misc_feature 1..20: note = Synthetic Sequence
  source 1..20: mol_type = other DNA
gggagtgtgcgaataggtgt

SEQ ID NO: 2088 - DNA, 20 bp, synthetic construct
  misc_feature 1..20: note = Synthetic Sequence
  source 1..20: mol_type = other DNA
tcatgattgtaagtttcctg

SEQ ID NO: 2089 - DNA, 20 bp, synthetic construct
  misc_feature 1..20: note = Synthetic Sequence
  source 1..20: mol_type = other DNA
ggttagaagcaagatggagt

SEQ ID NO: 2090 - DNA, 20 bp, synthetic construct
  misc_feature 1..20: note = Synthetic Sequence
  source 1..20: mol_type = other DNA
tggaggcagggcaagatcac

SEQ ID NO: 2091 - DNA, 20 bp, synthetic construct
  misc_feature 1..20: note = Synthetic Sequence
  source 1..20: mol_type = other DNA
ttgaacccgggaggtggagg

SEQ ID NO: 2092 - DNA, 20 bp, synthetic construct
  misc_feature 1..20: note = Synthetic Sequence
  source 1..20: mol_type = other DNA
aggcagaggagaacaaagga

SEQ ID NO: 2093 - DNA, 20 bp, synthetic construct
  misc_feature 1..20: note = Synthetic Sequence
  source 1..20: mol_type = other DNA
gggtcacaaggtactcagtg

SEQ ID NO: 2094 - DNA, 20 bp, synthetic construct
  misc_feature 1..20: note = Synthetic Sequence
  source 1..20: mol_type = other DNA
ctcaagcgatccacccgcct

SEQ ID NO: 2095 - DNA, 20 bp, synthetic construct
  misc_feature 1..20: note = Synthetic Sequence
  source 1..20: mol_type = other DNA
cacgtgaccttacctatcat

SEQ ID NO: 2096 - DNA, 20 bp, synthetic construct
  misc_feature 1..20: note = Synthetic Sequence
  source 1..20: mol_type = other DNA
taatcacatcagggtaaatg

SEQ ID NO: 2097 - DNA, 20 bp, synthetic construct
  misc_feature 1..20: note = Synthetic Sequence
  source 1..20: mol_type = other DNA
tcaggacataggcatgagca

SEQ ID NO: 2098 - DNA, 20 bp, synthetic construct
  misc_feature 1..20: note = Synthetic Sequence
  source 1..20: mol_type = other DNA
agctaaacattgagtacaca

SEQ ID NO: 2099 - DNA, 20 bp, synthetic construct
  misc_feature 1..20: note = Synthetic Sequence
  source 1..20: mol_type = other DNA
ggtcacaaggtactcagtgg

SEQ ID NO: 2100 - DNA, 20 bp, synthetic construct
  misc_feature 1..20: note = Synthetic Sequence
  source 1..20: mol_type = other DNA
tcaaaggataaatgcttgag

SEQ ID NO: 2101 - DNA, 20 bp, synthetic construct
  misc_feature 1..20: note = Synthetic Sequence
  source 1..20: mol_type = other DNA
caatcagcactctgtcaaaa

SEQ ID NO: 2102 - DNA, 20 bp, synthetic construct
  misc_feature 1..20: note = Synthetic Sequence
  source 1..20: mol_type = other DNA
ggtaggttagtgagggattt

SEQ ID NO: 2103 - DNA, 20 bp, synthetic construct
  misc_feature 1..20: note = Synthetic Sequence
  source 1..20: mol_type = other DNA
cagggtaatagaatatcaca

SEQ ID NO: 2104 - DNA, 20 bp, synthetic construct
  misc_feature 1..20: note = Synthetic Sequence
  source 1..20: mol_type = other DNA
aaacccaggcaataccattc

SEQ ID NO: 2105 - DNA, 20 bp, synthetic construct
  misc_feature 1..20: note = Synthetic Sequence
  source 1..20: mol_type = other DNA
aggaggctgaggtgggagaa

SEQ ID NO: 2106 - DNA, 20 bp, synthetic construct
  misc_feature 1..20: note = Synthetic Sequence
  source 1..20: mol_type = other DNA
caagatgggcggatcacctg

SEQ ID NO: 2107 - DNA, 20 bp, synthetic construct
  misc_feature 1..20: note = Synthetic Sequence
  source 1..20: mol_type = other DNA
cctcagaaaacttacaatca

SEQ ID NO: 2108 - DNA, 20 bp, synthetic construct
  misc_feature 1..20: note = Synthetic Sequence
  source 1..20: mol_type = other DNA
ggcctcagaatcatggcggg

SEQ ID NO: 2109 - DNA, 20 bp, synthetic construct
  misc_feature 1..20: note = Synthetic Sequence
  source 1..20: mol_type = other DNA
gccgaggcgagcggatcacg

SEQ ID NO: 2110 - DNA, 20 bp, synthetic construct
  misc_feature 1..20: note = Synthetic Sequence
  source 1..20: mol_type = other DNA
cagacatcaagtacttaaca

SEQ ID NO: 2111 - DNA, 20 bp, synthetic construct
  misc_feature 1..20: note = Synthetic Sequence
  source 1..20: mol_type = other DNA
cgcgaccatcctggctaaca

SEQ ID NO: 2112 - DNA, 20 bp, synthetic construct
  misc_feature 1..20: note = Synthetic Sequence
  source 1..20: mol_type = other DNA
gaaaatggcgtgaacctggg

SEQ ID NO: 2113 - DNA, 20 bp, synthetic construct
  misc_feature 1..20: note = Synthetic Sequence
  source 1..20: mol_type = other DNA
taggtatatgtgtgccatgg

SEQ ID NO: 2114 - DNA, 20 bp, synthetic construct
  misc_feature 1..20: note = Synthetic Sequence
  source 1..20: mol_type = other DNA
gggtcacgtgtccactggac

SEQ ID NO: 2115 - DNA, 20 bp, synthetic construct
  misc_feature 1..20: note = Synthetic Sequence
  source 1..20: mol_type = other DNA
acagacatcaagtacttaac

SEQ ID NO: 2116 - DNA, 20 bp, synthetic construct
  misc_feature 1..20: note = Synthetic Sequence
  source 1..20: mol_type = other DNA
ccaatcagcaggacatgggc

SEQ ID NO: 2117 - DNA, 20 bp, synthetic construct
  misc_feature 1..20: note = Synthetic Sequence
  source 1..20: mol_type = other DNA
ggtgaaaggcatgtctcaca

SEQ ID NO: 2118 - DNA, 20 bp, synthetic construct
  misc_feature 1..20: note = Synthetic Sequence
  source 1..20: mol_type = other DNA
ggtatatgtgcacaatgtgc

SEQ ID NO: 2119 - DNA, 20 bp, synthetic construct
  misc_feature 1..20: note = Synthetic Sequence
  source 1..20: mol_type = other DNA
cgctggaacccgggaggcgg

SEQ ID NO: 2120 - DNA, 20 bp, synthetic construct
  misc_feature 1..20: note = Synthetic Sequence
  source 1..20: mol_type = other DNA
gggcaggggcgggggtcaca

SEQ ID NO: 2121 - DNA, 20 bp, synthetic construct
  misc_feature 1..20: note = Synthetic Sequence
  source 1..20: mol_type = other DNA
tgtgattcttcacttgcttc

SEQ ID NO: 2122 - DNA, 20 bp, synthetic construct
  misc_feature 1..20: note = Synthetic Sequence
  source 1..20: mol_type = other DNA
cgcctgaacctgggaggcgg

SEQ ID NO: 2123 - DNA, 20 bp, synthetic construct
  misc_feature 1..20: note = Synthetic Sequence
  source 1..20: mol_type = other DNA
aatagcgtgaacctgggagg

SEQ ID NO: 2124 - DNA, 20 bp, synthetic construct
  misc_feature 1..20: note = Synthetic Sequence
  source 1..20: mol_type = other DNA
tgtagggacatgaatgaagc

SEQ ID NO: 2125 - DNA, 20 bp, synthetic construct
  misc_feature 1..20: note = Synthetic Sequence
  source 1..20: mol_type = other DNA
tggggaggatgtggagaaat

SEQ ID NO: 2126 - DNA, 20 bp, synthetic construct
  misc_feature 1..20: note = Synthetic Sequence
  source 1..20: mol_type = other DNA
catgagatgatatctcattg

SEQ ID NO: 2127 - DNA, 20 bp, synthetic construct
  misc_feature 1..20: note = Synthetic Sequence
  source 1..20: mol_type = other DNA
caatgataggtaaggtcacg

SEQ ID NO: 2128 - DNA, 20 bp, synthetic construct
  misc_feature 1..20: note = Synthetic Sequence
  source 1..20: mol_type = other DNA
tacattggtttggtccagaa

SEQ ID NO: 2129 - DNA, 20 bp, synthetic construct
  misc_feature 1..20: note = Synthetic Sequence
  source 1..20: mol_type = other DNA
gtgaggcctccctagccatg

SEQ ID NO: 2130 - DNA, 20 bp, synthetic construct
  misc_feature 1..20: note = Synthetic Sequence
  source 1..20: mol_type = other DNA
aggcagagactggagtgatg

SEQ ID NO: 2131 - DNA, 20 bp, synthetic construct
  misc_feature 1..20: note = Synthetic Sequence
  source 1..20: mol_type = other DNA
ctgaggcctcctcagccatg

SEQ ID NO: 2132 - DNA, 20 bp, synthetic construct
  misc_feature 1..20: note = Synthetic Sequence
  source 1..20: mol_type = other DNA
ccccatcaaaaagtaggtga

SEQ ID NO: 2133 - DNA, 20 bp, synthetic construct
  misc_feature 1..20: note = Synthetic Sequence
  source 1..20: mol_type = other DNA
caaagcttccacagcgtgga

SEQ ID NO: 2134 - DNA, 20 bp, synthetic construct
  misc_feature 1..20: note = Synthetic Sequence
  source 1..20: mol_type = other DNA
ggtcacgtgtccactggaca

SEQ ID NO: 2135 - DNA, 20 bp, synthetic construct
  misc_feature 1..20: note = Synthetic Sequence
  source 1..20: mol_type = other DNA
caaggtaggcagatcacttg

SEQ ID NO: 2136 - DNA, 20 bp, synthetic construct
  misc_feature 1..20: note = Synthetic Sequence
  source 1..20: mol_type = other DNA
tttaagggcttacaactcta

SEQ ID NO: 2137 - DNA, 20 bp, synthetic construct
  misc_feature 1..20: note = Synthetic Sequence
  source 1..20: mol_type = other DNA
gatcacaggaccacaggact

SEQ ID NO: 2138 - DNA, 20 bp, synthetic construct
  misc_feature 1..20: note = Synthetic Sequence
  source 1..20: mol_type = other DNA
accaatcagcaggacatggg

SEQ ID NO: 2139 - DNA, 20 bp, synthetic construct
  misc_feature 1..20: note = Synthetic Sequence
  source 1..20: mol_type = other DNA
tgatcgattgagcaagcagg

SEQ ID NO: 2140 - DNA, 20 bp, synthetic construct
  misc_feature 1..20: note = Synthetic Sequence
  source 1..20: mol_type = other DNA
tagagttgtaagcccttaaa

SEQ ID NO: 2141 - DNA, 20 bp, synthetic construct
  misc_feature 1..20: note = Synthetic Sequence
  source 1..20: mol_type = other DNA
cgcatggctggggaggcctc

SEQ ID NO: 2142 - DNA, 20 bp, synthetic construct
  misc_feature 1..20: note = Synthetic Sequence
  source 1..20: mol_type = other DNA
gccgaggctggcagatcacg

SEQ ID NO: 2143 - DNA, 20 bp, synthetic construct
  misc_feature 1..20: note = Synthetic Sequence
  source 1..20: mol_type = other DNA
tacaaaaaagtagccgggcg

SEQ ID NO: 2144 - DNA, 20 bp, synthetic construct
  misc_feature 1..20: note = Synthetic Sequence
  source 1..20: mol_type = other DNA
ccagagtttcttccttctgg

SEQ ID NO: 2145 - DNA, 20 bp, synthetic construct
  misc_feature 1..20: note = Synthetic Sequence
  source 1..20: mol_type = other DNA
ggcaggcggatcacgaggtt

SEQ ID NO: 2146 - DNA, 20 bp, synthetic construct
  misc_feature 1..20: note = Synthetic Sequence
  source 1..20: mol_type = other DNA
tttcaccatcttggccaagc

SEQ ID NO: 2147 - DNA, 20 bp, synthetic construct
  misc_feature 1..20: note = Synthetic Sequence
  source 1..20: mol_type = other DNA
agcgaggattattataatat

SEQ ID NO: 2148 - DNA, 20 bp, synthetic construct
  misc_feature 1..20: note = Synthetic Sequence
  source 1..20: mol_type = other DNA
gagagtcagcaaagggtggt

SEQ ID NO: 2149 - DNA, 20 bp, synthetic construct
  misc_feature 1..20: note = Synthetic Sequence
  source 1..20: mol_type = other DNA
tttattagggagtttcaaaa

SEQ ID NO: 2150 - DNA, 20 bp, synthetic construct
  misc_feature 1..20: note = Synthetic Sequence
  source 1..20: mol_type = other DNA
aatgataggtaaggtcacgt

SEQ ID NO: 2151 - DNA, 20 bp, synthetic construct
  misc_feature 1..20: note = Synthetic Sequence
  source 1..20: mol_type = other DNA
atacaaaaaatagctgggca

SEQ ID NO: 2152 - DNA, 20 bp, synthetic construct
  misc_feature 1..20: note = Synthetic Sequence
  source 1..20: mol_type = other DNA
cctgatccagaccccaagag

SEQ ID NO: 2153 - DNA, 20 bp, synthetic construct
  misc_feature 1..20: note = Synthetic Sequence
  source 1..20: mol_type = other DNA
gtttcacgtgttagccagga

SEQ ID NO: 2154 - DNA, 20 bp, synthetic construct
  misc_feature 1..20: note = Synthetic Sequence
  source 1..20: mol_type = other DNA
tctctgatatgcagaaataa

SEQ ID NO: 2155 - DNA, 20 bp, synthetic construct
  misc_feature 1..20: note = Synthetic Sequence
  source 1..20: mol_type = other DNA
tcgcccaagctggactgcag

SEQ ID NO: 2156 - DNA, 20 bp, synthetic construct
  misc_feature 1..20: note = Synthetic Sequence
  source 1..20: mol_type = other DNA
acataggtatatgtgtgcca

SEQ ID NO: 2157 - DNA, 20 bp, synthetic construct
  misc_feature 1..20: note = Synthetic Sequence
  source 1..20: mol_type = other DNA
cagaggagaacaaaggaagg

SEQ ID NO: 2158 - DNA, 20 bp, synthetic construct
  misc_feature 1..20: note = Synthetic Sequence
  source 1..20: mol_type = other DNA
agaagaagataggaaaatgt

SEQ ID NO: 2159 - DNA, 20 bp, synthetic construct
  misc_feature 1..20: note = Synthetic Sequence
  source 1..20: mol_type = other DNA
gataaagacatacctgaaac

SEQ ID NO: 2160 - DNA, 20 bp, synthetic construct
  misc_feature 1..20: note = Synthetic Sequence
  source 1..20: mol_type = other DNA
ggacaggaattgctcactcg

SEQ ID NO: 2161 - DNA, 20 bp, synthetic construct
  misc_feature 1..20: note = Synthetic Sequence
  source 1..20: mol_type = other DNA
caatcatggcggaaggtgaa

SEQ ID NO: 2162 - DNA, 20 bp, synthetic construct
  misc_feature 1..20: note = Synthetic Sequence
  source 1..20: mol_type = other DNA
aaagaatcaagcagaaattc

SEQ ID NO: 2163 - DNA, 20 bp, synthetic construct
  misc_feature 1..20: note = Synthetic Sequence
  source 1..20: mol_type = other DNA
acagagatcacatgcttcaa

SEQ ID NO: 2164 - DNA, 20 bp, synthetic construct
  misc_feature 1..20: note = Synthetic Sequence
  source 1..20: mol_type = other DNA
caggagaatggtgggaaccc

SEQ ID NO: 2165 - DNA, 20 bp, synthetic construct
  misc_feature 1..20: note = Synthetic Sequence
  source 1..20: mol_type = other DNA
tatgtcatgccactctctcc

SEQ ID NO: 2166 - DNA, 20 bp, synthetic construct
  misc_feature 1..20: note = Synthetic Sequence
  source 1..20: mol_type = other DNA
tagggagtttcaaaagggga

SEQ ID NO: 2167 - DNA, 20 bp, synthetic construct
  misc_feature 1..20: note = Synthetic Sequence
  source 1..20: mol_type = other DNA
cccagctattcgggagactg

SEQ ID NO: 2168 - DNA, 20 bp, synthetic construct
  misc_feature 1..20: note = Synthetic Sequence
  source 1..20: mol_type = other DNA
caagaccagcttggccaaga

SEQ ID NO: 2169 - DNA, 20 bp, synthetic construct
  misc_feature 1..20: note = Synthetic Sequence
  source 1..20: mol_type = other DNA
gtctattgttgttggacatt

SEQ ID NO: 2170 - DNA, 20 bp, synthetic construct
  misc_feature 1..20: note = Synthetic Sequence
  source 1..20: mol_type = other DNA
atgatttcatgtcctttgta

SEQ ID NO: 2171 - DNA, 20 bp, synthetic construct
  misc_feature 1..20: note = Synthetic Sequence
  source 1..20: mol_type = other DNA
agagatgggtttctccatgt

SEQ ID NO: 2172 - DNA, 20 bp, synthetic construct
  misc_feature 1..20: note = Synthetic Sequence
  source 1..20: mol_type = other DNA
gagaacacatggacacatgg

SEQ ID NO: 2173 - DNA, 20 bp, synthetic construct
  misc_feature 1..20: note = Synthetic Sequence
  source 1..20: mol_type = other DNA
gcagcaggaacatgtcctta

SEQ ID NO: 2174 - DNA, 20 bp, synthetic construct
  misc_feature 1..20: note = Synthetic Sequence
  source 1..20: mol_type = other DNA
cccaggttcaagcgattctc

SEQ ID NO: 2175 - DNA, 20 bp, synthetic construct
  misc_feature 1..20: note = Synthetic Sequence
  source 1..20: mol_type = other DNA
tcagcaatgccccactctac

SEQ ID NO: 2176 - DNA, 20 bp, synthetic construct
  misc_feature 1..20: note = Synthetic Sequence
  source 1..20: mol_type = other DNA
ttattagggagtttcaaaag

SEQ ID NO: 2177 - DNA, 20 bp, synthetic construct
  misc_feature 1..20: note = Synthetic Sequence
  source 1..20: mol_type = other DNA
tctcactctttcgcccaagc

SEQ ID NO: 2178 - DNA, 20 bp, synthetic construct
  misc_feature 1..20: note = Synthetic Sequence
  source 1..20: mol_type = other DNA
tacagaaaaggtcaagctgc

SEQ ID NO: 2179 - DNA, 20 bp, synthetic construct
  misc_feature 1..20: note = Synthetic Sequence
  source 1..20: mol_type = other DNA
caggagaataacttgaacct

SEQ ID NO: 2180 - DNA, 20 bp, synthetic construct
  misc_feature 1..20: note = Synthetic Sequence
  source 1..20: mol_type = other DNA
gaaattataagagtattatt

SEQ ID NO: 2181 - DNA, 20 bp, synthetic construct
  misc_feature 1..20: note = Synthetic Sequence
  source 1..20: mol_type = other DNA
ataatgatcaataaatactg

SEQ ID NO: 2182 - DNA, 20 bp, synthetic construct
  misc_feature 1..20: note = Synthetic Sequence
  source 1..20: mol_type = other DNA
cgagaccagcctggccagta

SEQ ID NO: 2183 - DNA, 20 bp, synthetic construct
  misc_feature 1..20: note = Synthetic Sequence
  source 1..20: mol_type = other DNA
actaaagatttcacatgaaa

SEQ ID NO: 2184 - DNA, 20 bp, synthetic construct
  misc_feature 1..20: note = Synthetic Sequence
  source 1..20: mol_type = other DNA
ggattatcattagttcttac

SEQ ID NO: 2185 - DNA, 20 bp, synthetic construct
  misc_feature 1..20: note = Synthetic Sequence
  source 1..20: mol_type = other DNA
acttgagggtggagggtggg

SEQ ID NO: 2186 - DNA, 20 bp, synthetic construct
  misc_feature 1..20: note = Synthetic Sequence
  source 1..20: mol_type = other DNA
taatgatcaataaatactga

SEQ ID NO: 2187 - DNA, 20 bp, synthetic construct
  misc_feature 1..20: note = Synthetic Sequence
  source 1..20: mol_type = other DNA
cagacatgcaccaccacgcc

SEQ ID NO: 2188 - DNA, 20 bp, synthetic construct
  misc_feature 1..20: note = Synthetic Sequence
  source 1..20: mol_type = other DNA
caggagaattgcatgaacct

SEQ ID NO: 2189 - DNA, 20 bp, synthetic construct
  misc_feature 1..20: note = Synthetic Sequence
  source 1..20: mol_type = other DNA
ttagggagtttcaaaagggg

SEQ ID NO: 2190 - DNA, 20 bp, synthetic construct
  misc_feature 1..20: note = Synthetic Sequence
  source 1..20: mol_type = other DNA
tggcccatgacacagccctc

SEQ ID NO: 2191 - DNA, 20 bp, synthetic construct
  misc_feature 1..20: note = Synthetic Sequence
  source 1..20: mol_type = other DNA
ccccaccccctgacaggccc

SEQ ID NO: 2192 - DNA, 20 bp, synthetic construct
  misc_feature 1..20: note = Synthetic Sequence
  source 1..20: mol_type = other DNA
ttctggacatttcatataaa

SEQ ID NO: 2193 - DNA, 20 bp, synthetic construct
  misc_feature 1..20: note = Synthetic Sequence
  source 1..20: mol_type = other DNA
cccagatcttcttggcttag

SEQ ID NO: 2194 - DNA, 20 bp, synthetic construct
  misc_feature 1..20: note = Synthetic Sequence
  source 1..20: mol_type = other DNA
gagaatggtgtgaacccaga

SEQ ID NO: 2195 - DNA, 20 bp, synthetic construct
  misc_feature 1..20: note = Synthetic Sequence
  source 1..20: mol_type = other DNA
cagggatgcctggagccccc

SEQ ID NO: 2196 - DNA, 20 bp, synthetic construct
  misc_feature 1..20: note = Synthetic Sequence
  source 1..20: mol_type = other DNA
cctcagtctcccgaatagct

SEQ ID NO: 2197 - DNA, 20 bp, synthetic construct
  misc_feature 1..20: note = Synthetic Sequence
  source 1..20: mol_type = other DNA
caggagaatggtgcgaaccc

SEQ ID NO: 2198 - DNA, 20 bp, synthetic construct
  misc_feature 1..20: note = Synthetic Sequence
  source 1..20: mol_type = other DNA
tacaaaaaattagctaggtg

SEQ ID NO: 2199 - DNA, 20 bp, synthetic construct
  misc_feature 1..20: note = Synthetic Sequence
  source 1..20: mol_type = other DNA
cttatgggaaacaaagggat

SEQ ID NO: 2200 - DNA, 20 bp, synthetic construct
  misc_feature 1..20: note = Synthetic Sequence
  source 1..20: mol_type = other DNA
ccattcaacaagtctctagg

SEQ ID NO: 2201 - DNA, 20 bp, synthetic construct
  misc_feature 1..20: note = Synthetic Sequence
  source 1..20: mol_type = other DNA
tcgaagagggggatgtgtca

SEQ ID NO: 2202 - DNA, 20 bp, synthetic construct
  misc_feature 1..20: note = Synthetic Sequence
  source 1..20: mol_type = other DNA
ttaaaaggataaatggttac

SEQ ID NO: 2203 - DNA, 20 bp, synthetic construct
  misc_feature 1..20: note = Synthetic Sequence
  source 1..20: mol_type = other DNA
aactgtaacactcaccgtga

SEQ ID NO: 2204 - DNA, 20 bp, synthetic construct
  misc_feature 1..20: note = Synthetic Sequence
  source 1..20: mol_type = other DNA
ttaactaaaagtattcctta

SEQ ID NO: 2205 - DNA, 20 bp, synthetic construct
  misc_feature 1..20: note = Synthetic Sequence
  source 1..20: mol_type = other DNA
gaaacggggtttcactatgt

SEQ ID NO: 2206 - DNA, 20 bp, synthetic construct
  misc_feature 1..20: note = Synthetic Sequence
  source 1..20: mol_type = other DNA
aggcaggagtgggggtcaca

SEQ ID NO: 2207 - DNA, 20 bp, synthetic construct
  misc_feature 1..20: note = Synthetic Sequence
  source 1..20: mol_type = other DNA
ctgaggatgtacgtcacctc

SEQ ID NO: 2208 - DNA, 20 bp, synthetic construct
  misc_feature 1..20: note = Synthetic Sequence
  source 1..20: mol_type = other DNA
ctcgaagagggggatgtgtc

SEQ ID NO: 2209 - DNA, 20 bp, synthetic construct
  misc_feature 1..20: note = Synthetic Sequence
  source 1..20: mol_type = other DNA
ccttatgggaaacaaaggga

SEQ ID NO: 2210 - DNA, 20 bp, synthetic construct
  misc_feature 1..20: note = Synthetic Sequence
  source 1..20: mol_type = other DNA
tcacatgcttctgaggaaac

SEQ ID NO: 2211 - DNA, 20 bp, synthetic construct
  misc_feature 1..20: note = Synthetic Sequence
  source 1..20: mol_type = other DNA
aattgaataatgagaacaca

SEQ ID NO: 2212 - DNA, 20 bp, synthetic construct
  misc_feature 1..20: note = Synthetic Sequence
  source 1..20: mol_type = other DNA
aaaatacaaaaaaattaact

SEQ ID NO: 2213 - DNA, 20 bp, synthetic construct
  misc_feature 1..20: note = Synthetic Sequence
  source 1..20: mol_type = other DNA
cactaaagatttcacatgaa

SEQ ID NO: 2214 - DNA, 20 bp, synthetic construct
  misc_feature 1..20: note = Synthetic Sequence
  source 1..20: mol_type = other DNA
tagcccaggccggattgcag

SEQ ID NO: 2215 - DNA, 20 bp, synthetic construct
  misc_feature 1..20: note = Synthetic Sequence
  source 1..20: mol_type = other DNA
gcgccactgcagtccagctt

SEQ ID NO: 2216 - DNA, 20 bp, synthetic construct
  misc_feature 1..20: note = Synthetic Sequence
  source 1..20: mol_type = other DNA
aaaaaggagtcagcaaaggg

SEQ ID NO: 2217 - DNA, 20 bp, synthetic construct
  misc_feature 1..20: note = Synthetic Sequence
  source 1..20: mol_type = other DNA
ttcaaataaggaagaggaac

SEQ ID NO: 2218 - DNA, 20 bp, synthetic construct
  misc_feature 1..20: note = Synthetic Sequence
  source 1..20: mol_type = other DNA
gagaatcgctcgaacctggg

SEQ ID NO: 2219 - DNA, 20 bp, synthetic construct
  misc_feature 1..20: note = Synthetic Sequence
  source 1..20: mol_type = other DNA
aggagagcagggtgataata

SEQ ID NO: 2220 - DNA, 20 bp, synthetic construct
  misc_feature 1..20: note = Synthetic Sequence
  source 1..20: mol_type = other DNA
atgagtggataaagaaaatg

SEQ ID NO: 2221 - DNA, 20 bp, synthetic construct
  misc_feature 1..20: note = Synthetic Sequence
  source 1..20: mol_type = other DNA
tcattagttcttacaggttt

SEQ ID NO: 2222 - DNA, 20 bp, synthetic construct
  misc_feature 1..20: note = Synthetic Sequence
  source 1..20: mol_type = other DNA
aagaaaagacagctgggccc

SEQ ID NO: 2223 - DNA, 20 bp, synthetic construct
  misc_feature 1..20: note = Synthetic Sequence
  source 1..20: mol_type = other DNA
cctatttagtaaatggtgct

SEQ ID NO: 2224 - DNA, 20 bp, synthetic construct
  misc_feature 1..20: note = Synthetic Sequence
  source 1..20: mol_type = other DNA
tccaggcatccctgggcttg

SEQ ID NO: 2225 - DNA, 20 bp, synthetic construct
  misc_feature 1..20: note = Synthetic Sequence
  source 1..20: mol_type = other DNA
cttcattcatgtccctacaa

SEQ ID NO: 2226 - DNA, 20 bp, synthetic construct
  misc_feature 1..20: note = Synthetic Sequence
  source 1..20: mol_type = other DNA
cacttcaacctgggaggcag

SEQ ID NO: 2227 - DNA, 20 bp, synthetic construct
  misc_feature 1..20: note = Synthetic Sequence
  source 1..20: mol_type = other DNA
gggtaatttataaagaaaaa

SEQ ID NO: 2228 - DNA, 20 bp, synthetic construct
  misc_feature 1..20: note = Synthetic Sequence
  source 1..20: mol_type = other DNA
aaagtagctgggcgtggtgg

SEQ ID NO: 2229 - DNA, 20 bp, synthetic construct
  misc_feature 1..20: note = Synthetic Sequence
  source 1..20: mol_type = other DNA
cacttgaactggggaggtgg

SEQ ID NO: 2230 - DNA, 20 bp, synthetic construct
  misc_feature 1..20: note = Synthetic Sequence
  source 1..20: mol_type = other DNA
tcataattaagttcaaggga

SEQ ID NO: 2231 - DNA, 20 bp, synthetic construct
  misc_feature 1..20: note = Synthetic Sequence
  source 1..20: mol_type = other DNA
atgagtgcagcaaaccacca

SEQ ID NO: 2232 - DNA, 20 bp, synthetic construct
  misc_feature 1..20: note = Synthetic Sequence
  source 1..20: mol_type = other DNA
ttgagttcattgtagattct

SEQ ID NO: 2233 - DNA, 20 bp, synthetic construct
  misc_feature 1..20: note = Synthetic Sequence
  source 1..20: mol_type = other DNA
tccctgagagctgggattac

SEQ ID NO: 2234 - DNA, 20 bp, synthetic construct
  misc_feature 1..20: note = Synthetic Sequence
  source 1..20: mol_type = other DNA
caagaccatcccggctaaca

SEQ ID NO: 2235 - DNA, 20 bp, synthetic construct
  misc_feature 1..20: note = Synthetic Sequence
  source 1..20: mol_type = other DNA
ctgtacaggaagcatgatgc

SEQ ID NO: 2236 - DNA, 20 bp, synthetic construct
  misc_feature 1..20: note = Synthetic Sequence
  source 1..20: mol_type = other DNA
atttatcatttctttgtgtt

SEQ ID NO: 2237 - DNA, 20 bp, synthetic construct
  misc_feature 1..20: note = Synthetic Sequence
  source 1..20: mol_type = other DNA
ggcggacggatcatgaggtc

SEQ ID NO: 2238 - DNA, 20 bp, synthetic construct
  misc_feature 1..20: note = Synthetic Sequence
  source 1..20: mol_type = other DNA
gatgtatacatgcaggtcac

SEQ ID NO: 2239 - DNA, 20 bp, synthetic construct
  misc_feature 1..20: note = Synthetic Sequence
  source 1..20: mol_type = other DNA
tggaagtagctctcagcaga

SEQ ID NO: 2240 - DNA, 20 bp, synthetic construct
  misc_feature 1..20: note = Synthetic Sequence
  source 1..20: mol_type = other DNA
ctggggaggcttcacaatca

SEQ ID NO: 2241 - DNA, 20 bp, synthetic construct
  misc_feature 1..20: note = Synthetic Sequence
  source 1..20: mol_type = other DNA
gcaactatatgccaataaat

SEQ ID NO: 2242 - DNA, 20 bp, synthetic construct
  misc_feature 1..20: note = Synthetic Sequence
  source 1..20: mol_type = other DNA
agcgccactgcagtccagct

SEQ ID NO: 2243 - DNA, 20 bp, synthetic construct
  misc_feature 1..20: note = Synthetic Sequence
  source 1..20: mol_type = other DNA
aatgagaacacctggacaca

SEQ ID NO: 2244 - DNA, 20 bp, synthetic construct
  misc_feature 1..20: note = Synthetic Sequence
  source 1..20: mol_type = other DNA
ccatgattgtaaatttcctg

SEQ ID NO: 2245 - DNA, 20 bp, synthetic construct
  misc_feature 1..20: note = Synthetic Sequence
  source 1..20: mol_type = other DNA
cccagcaccatttactaaat

SEQ ID NO: 2246 - DNA, 20 bp, synthetic construct
  misc_feature 1..20: note = Synthetic Sequence
  source 1..20: mol_type = other DNA
gcccggacagggccaccaga

SEQ ID NO: 2247 - DNA, 20 bp, synthetic construct
  misc_feature 1..20: note = Synthetic Sequence
  source 1..20: mol_type = other DNA
tgtaatcccagctctcaggg

SEQ ID NO: 2248 - DNA, 20 bp, synthetic construct
  misc_feature 1..20: note = Synthetic Sequence
  source 1..20: mol_type = other DNA
tgtatacatgcaggtcacag

SEQ ID NO: 2249 - DNA, 20 bp, synthetic construct
  misc_feature 1..20: note = Synthetic Sequence
  source 1..20: mol_type = other DNA
gagaatgacatgaacctggg

SEQ ID NO: 2250 - DNA, 20 bp, synthetic construct
  misc_feature 1..20: note = Synthetic Sequence
  source 1..20: mol_type = other DNA
taaaaactgagggaactcag

SEQ ID NO: 2251 - DNA, 20 bp, synthetic construct
  misc_feature 1..20: note = Synthetic Sequence
  source 1..20: mol_type = other DNA
aagacgaggtttcaccatgt

SEQ ID NO: 2252 - DNA, 20 bp, synthetic construct
  misc_feature 1..20: note = Synthetic Sequence
  source 1..20: mol_type = other DNA
tcagcaaaaaggaatgtagt

SEQ ID NO: 2253 - DNA, 20 bp, synthetic construct
  misc_feature 1..20: note = Synthetic Sequence
  source 1..20: mol_type = other DNA
aggagaatggcatgaacccg

SEQ ID NO: 2254 - DNA, 20 bp, synthetic construct
  misc_feature 1..20: note = Synthetic Sequence
  source 1..20: mol_type = other DNA
caggagaattgtgtgaaccc

SEQ ID NO: 2255 - DNA, 20 bp, synthetic construct
  misc_feature 1..20: note = Synthetic Sequence
  source 1..20: mol_type = other DNA
aatggacttacagttccatg

SEQ ID NO: 2256 - DNA, 20 bp, synthetic construct
  misc_feature 1..20: note = Synthetic Sequence
  source 1..20: mol_type = other DNA
ggaagggggagggatagcat

SEQ ID NO: 2257 - DNA, 20 bp, synthetic construct
  misc_feature 1..20: note = Synthetic Sequence
  source 1..20: mol_type = other DNA
tctgatggtttaaaagtgtg

SEQ ID NO: 2258 - DNA, 20 bp, synthetic construct
  misc_feature 1..20: note = Synthetic Sequence
  source 1..20: mol_type = other DNA
gagaacacctggacacaggg

SEQ ID NO: 2259 - DNA, 20 bp, synthetic construct
  misc_feature 1..20: note = Synthetic Sequence
  source 1..20: mol_type = other DNA
taagtgaagtaactcaagaa

SEQ ID NO: 2260 - DNA, 20 bp, synthetic construct
  misc_feature 1..20: note = Synthetic Sequence
  source 1..20: mol_type = other DNA
cctcaggaaatttacaatca

SEQ ID NO: 2261 - DNA, 20 bp, synthetic construct
  misc_feature 1..20: note = Synthetic Sequence
  source 1..20: mol_type = other DNA
gggggatgtggcaggacaat

SEQ ID NO: 2262 - DNA, 20 bp, synthetic construct
  misc_feature 1..20: note = Synthetic Sequence
  source 1..20: mol_type = other DNA
catttatcatttctttgtgt

SEQ ID NO: 2263 - DNA, 20 bp, synthetic construct
  misc_feature 1..20: note = Synthetic Sequence
  source 1..20: mol_type = other DNA
gctactcgggaggctgaaac

SEQ ID NO: 2264 - DNA, 20 bp, synthetic construct
  misc_feature 1..20: note = Synthetic Sequence
  source 1..20: mol_type = other DNA
aagtagctctcagcagatgg

SEQ ID NO: 2265 - DNA, 20 bp, synthetic construct
  misc_feature 1..20: note = Synthetic Sequence
  source 1..20: mol_type = other DNA
gcttaacaggaagcatgact

SEQ ID NO: 2266 - DNA, 20 bp, synthetic construct
  misc_feature 1..20: note = Synthetic Sequence
  source 1..20: mol_type = other DNA
gaagtgacctagaaggcaag

SEQ ID NO: 2267 - DNA, 20 bp, synthetic construct
  misc_feature 1..20: note = Synthetic Sequence
  source 1..20: mol_type = other DNA
tttatccagtctatcattgt

SEQ ID NO: 2268 - DNA, 20 bp, synthetic construct
  misc_feature 1..20: note = Synthetic Sequence
  source 1..20: mol_type = other DNA
atggggaacatcacacactg

SEQ ID NO: 2269 - DNA, 20 bp, synthetic construct
  misc_feature 1..20: note = Synthetic Sequence
  source 1..20: mol_type = other DNA
cagtagccgatttgatcaag

SEQ ID NO: 2270 - DNA, 20 bp, synthetic construct
  misc_feature 1..20: note = Synthetic Sequence
  source 1..20: mol_type = other DNA
gaatcgatcaagcagaagaa

SEQ ID NO: 2271 - DNA, 20 bp, synthetic construct
  misc_feature 1..20: note = Synthetic Sequence
  source 1..20: mol_type = other DNA
aatgtaatccccagtgttgg

SEQ ID NO: 2272 - DNA, 20 bp, synthetic construct
  misc_feature 1..20: note = Synthetic Sequence
  source 1..20: mol_type = other DNA
aaggagtcagcaaagggtgg

SEQ ID NO: 2273 - DNA, 20 bp, synthetic construct
  misc_feature 1..20: note = Synthetic Sequence
  source 1..20: mol_type = other DNA
gctattcgggagactgaggc

SEQ ID NO: 2274 - DNA, 20 bp, synthetic construct
  misc_feature 1..20: note = Synthetic Sequence
  source 1..20: mol_type = other DNA
gaatcatggcgggaggtgaa

SEQ ID NO: 2275 - DNA, 20 bp, synthetic construct
  misc_feature 1..20: note = Synthetic Sequence
  source 1..20: mol_type = other DNA
caggagatttgcttgaaccc

SEQ ID NO: 2276 - DNA, 20 bp, synthetic construct
  misc_feature 1..20: note = Synthetic Sequence
  source 1..20: mol_type = other DNA
ggcatggctggggaggcctc

SEQ ID NO: 2277 - DNA, 20 bp, synthetic construct
  misc_feature 1..20: note = Synthetic Sequence
  source 1..20: mol_type = other DNA
caggagaatcactttaacct

SEQ ID NO: 2278 - DNA, 20 bp, synthetic construct
  misc_feature 1..20: note = Synthetic Sequence
  source 1..20: mol_type = other DNA
cacttgaacctggggggcgg

SEQ ID NO: 2279 - DNA, 20 bp, synthetic construct
  misc_feature 1..20: note = Synthetic Sequence
  source 1..20: mol_type = other DNA
gaagtagctctcagcagatg

SEQ ID NO: 2280 - DNA, 20 bp, synthetic construct
  misc_feature 1..20: note = Synthetic Sequence
  source 1..20: mol_type = other DNA
ctgaggcctctccagccatg

SEQ ID NO: 2281 - DNA, 20 bp, synthetic construct
  misc_feature 1..20: note = Synthetic Sequence
  source 1..20: mol_type = other DNA
atgctgagcgccggtcccct

SEQ ID NO: 2282 - DNA, 20 bp, synthetic construct
  misc_feature 1..20: note = Synthetic Sequence
  source 1..20: mol_type = other DNA
gccgctaagccaagaagatc

SEQ ID NO: 2283 - DNA, 20 bp, synthetic construct
  misc_feature 1..20: note = Synthetic Sequence
  source 1..20: mol_type = other DNA
tttcttacagttctggaggc

SEQ ID NO: 2284 - DNA, 20 bp, synthetic construct
  misc_feature 1..20: note = Synthetic Sequence
  source 1..20: mol_type = other DNA
cacgatttcagccatgaatc

SEQ ID NO: 2285 - DNA, 20 bp, synthetic construct
  misc_feature 1..20: note = Synthetic Sequence
  source 1..20: mol_type = other DNA
gcaggagaatggtgtgagcc

SEQ ID NO: 2286 - DNA, 20 bp, synthetic construct
  misc_feature 1..20: note = Synthetic Sequence
  source 1..20: mol_type = other DNA
tgctgattggtagagctgag

SEQ ID NO: 2287 - DNA, 20 bp, synthetic construct
  misc_feature 1..20: note = Synthetic Sequence
  source 1..20: mol_type = other DNA
tattcacaatagtaaagaca

SEQ ID NO: 2288 - DNA, 20 bp, synthetic construct
  misc_feature 1..20: note = Synthetic Sequence
  source 1..20: mol_type = other DNA
ccagcaccatttactaaata

SEQ ID NO: 2289 - DNA, 20 bp, synthetic construct
  misc_feature 1..20: note = Synthetic Sequence
  source 1..20: mol_type = other DNA
cgtctcaaactcctgacctc

SEQ ID NO: 2290 - DNA, 20 bp, synthetic construct
  misc_feature 1..20: note = Synthetic Sequence
  source 1..20: mol_type = other DNA
tgtgtcaactcagagttgaa

SEQ ID NO: 2291 - DNA, 20 bp, synthetic construct
  misc_feature 1..20: note = Synthetic Sequence
  source 1..20: mol_type = other DNA
caggagaatgacatgaacct

SEQ ID NO: 2292 - DNA, 20 bp, synthetic construct
  misc_feature 1..20: note = Synthetic Sequence
  source 1..20: mol_type = other DNA
gattacaggtgcctgccacc

SEQ ID NO: 2293 - DNA, 20 bp, synthetic construct
  misc_feature 1..20: note = Synthetic Sequence
  source 1..20: mol_type = other DNA
ccctatttagtaaatggtgc

SEQ ID NO: 2294 - DNA, 20 bp, synthetic construct
  misc_feature 1..20: note = Synthetic Sequence
  source 1..20: mol_type = other DNA
gcttgcagacggcctattgt

SEQ ID NO: 2295 - DNA, 20 bp, synthetic construct
  misc_feature 1..20: note = Synthetic Sequence
  source 1..20: mol_type = other DNA
actcagctctaccaatcagc

SEQ ID NO: 2296 - DNA, 20 bp, synthetic construct
  misc_feature 1..20: note = Synthetic Sequence
  source 1..20: mol_type = other DNA
taatggatttagggctgtgc

SEQ ID NO: 2297 - DNA, 20 bp, synthetic construct
  misc_feature 1..20: note = Synthetic Sequence
  source 1..20: mol_type = other DNA
tctaccattgatggacattt

SEQ ID NO: 2298 - DNA, 20 bp, synthetic construct
  misc_feature 1..20: note = Synthetic Sequence
  source 1..20: mol_type = other DNA
aatgcataataatcacatca

SEQ ID NO: 2299 - DNA, 20 bp, synthetic construct
  misc_feature 1..20: note = Synthetic Sequence
  source 1..20: mol_type = other DNA
cttatagttccacatggctg

SEQ ID NO: 2300 - DNA, 20 bp, synthetic construct
  misc_feature 1..20: note = Synthetic Sequence
  source 1..20: mol_type = other DNA
ggcacccaccagatgccagc

SEQ ID NO: 2301 - DNA, 20 bp, synthetic construct
  misc_feature 1..20: note = Synthetic Sequence
  source 1..20: mol_type = other DNA
tctcttatctacctatgacc

SEQ ID NO: 2302 - DNA, 20 bp, synthetic construct
  misc_feature 1..20: note = Synthetic Sequence
  source 1..20: mol_type = other DNA
agtgatgcggccacaagccc

SEQ ID NO: 2303 - DNA, 20 bp, synthetic construct
  misc_feature 1..20: note = Synthetic Sequence
  source 1..20: mol_type = other DNA
acacagaggagaaggccacg

SEQ ID NO: 2304 - DNA, 20 bp, synthetic construct
  misc_feature 1..20: note = Synthetic Sequence
  source 1..20: mol_type = other DNA
cagaggttggaagagtttgg

SEQ ID NO: 2305 - DNA, 20 bp, synthetic construct
  misc_feature 1..20: note = Synthetic Sequence
  source 1..20: mol_type = other DNA
gacttatagttccacatggc

SEQ ID NO: 2306 - DNA, 20 bp, synthetic construct
  misc_feature 1..20: note = Synthetic Sequence
  source 1..20: mol_type = other DNA
cagcagatgggggagccaga

SEQ ID NO: 2307 - DNA, 20 bp, synthetic construct
  misc_feature 1..20: note = Synthetic Sequence
  source 1..20: mol_type = other DNA
gtgatcgattgagcaagcag

SEQ ID NO: 2308 - DNA, 20 bp, synthetic construct
  misc_feature 1..20: note = Synthetic Sequence
  source 1..20: mol_type = other DNA
tcaagggaaggtactatgac

SEQ ID NO: 2309 - DNA, 20 bp, synthetic construct
  misc_feature 1..20: note = Synthetic Sequence
  source 1..20: mol_type = other DNA
gagaatggcatgagcccggg

SEQ ID NO: 2310 - DNA, 20 bp, synthetic construct
  misc_feature 1..20: note = Synthetic Sequence
  source 1..20: mol_type = other DNA
taactaaaagtattccttat

SEQ ID NO: 2311 - DNA, 20 bp, synthetic construct
  misc_feature 1..20: note = Synthetic Sequence
  source 1..20: mol_type = other DNA
gagaatggcgcgaacccagg

SEQ ID NO: 2312 - DNA, 20 bp, synthetic construct
  misc_feature 1..20: note = Synthetic Sequence
  source 1..20: mol_type = other DNA
cctgttatcttcataagctg

SEQ ID NO: 2313 - DNA, 20 bp, synthetic construct
  misc_feature 1..20: note = Synthetic Sequence
  source 1..20: mol_type = other DNA
cacatcctgcacatgtatcc

SEQ ID NO: 2314 - DNA, 20 bp, synthetic construct
  misc_feature 1..20: note = Synthetic Sequence
  source 1..20: mol_type = other DNA
tctaccaatcagcaggacgt

SEQ ID NO: 2315 - DNA, 20 bp, synthetic construct
  misc_feature 1..20: note = Synthetic Sequence
  source 1..20: mol_type = other DNA
gccacaagcccagggatgcc

SEQ ID NO: 2316 - DNA, 20 bp, synthetic construct
  misc_feature 1..20: note = Synthetic Sequence
  source 1..20: mol_type = other DNA
aaggcataagaatgatacag

SEQ ID NO: 2317 - DNA, 20 bp, synthetic construct
  misc_feature 1..20: note = Synthetic Sequence
  source 1..20: mol_type = other DNA
cctcagcttatgaagataac

SEQ ID NO: 2318 - DNA, 20 bp, synthetic construct
  misc_feature 1..20: note = Synthetic Sequence
  source 1..20: mol_type = other DNA
aggggagggagtgtacaaat

SEQ ID NO: 2319 - DNA, 20 bp, synthetic construct
  misc_feature 1..20: note = Synthetic Sequence
  source 1..20: mol_type = other DNA
atgtatacatgcaggtcaca

SEQ ID NO: 2320 - DNA, 20 bp, synthetic construct
  misc_feature 1..20: note = Synthetic Sequence
  source 1..20: mol_type = other DNA
ccaggaatttgtggccagcc

SEQ ID NO: 2321 - DNA, 20 bp, synthetic construct
  misc_feature 1..20: note = Synthetic Sequence
  source 1..20: mol_type = other DNA
ggagaccatcctggttaaca

SEQ ID NO: 2322 - DNA, 20 bp, synthetic construct
  misc_feature 1..20: note = Synthetic Sequence
  source 1..20: mol_type = other DNA
tggatcacaaggtcaagaga

SEQ ID NO: 2323 - DNA, 20 bp, synthetic construct
  misc_feature 1..20: note = Synthetic Sequence
  source 1..20: mol_type = other DNA
cacacaccggggcctgtcag

SEQ ID NO: 2324 - DNA, 20 bp, synthetic construct
  misc_feature 1..20: note = Synthetic Sequence
  source 1..20: mol_type = other DNA
gcaggagcatcacttgaacc

SEQ ID NO: 2325 - DNA, 20 bp, synthetic construct
  misc_feature 1..20: note = Synthetic Sequence
  source 1..20: mol_type = other DNA
ccgctaagccaagaagatct

SEQ ID NO: 2326 - DNA, 20 bp, synthetic construct
  misc_feature 1..20: note = Synthetic Sequence
  source 1..20: mol_type = other DNA
tgtatggaatcaaggtttaa

SEQ ID NO: 2327 - DNA, 20 bp, synthetic construct
  misc_feature 1..20: note = Synthetic Sequence
  source 1..20: mol_type = other DNA
caggcatgcgccaccatgtc

SEQ ID NO: 2328 - DNA, 20 bp, synthetic construct
  misc_feature 1..20: note = Synthetic Sequence
  source 1..20: mol_type = other DNA
gagacaaggtttcaccacgt

SEQ ID NO: 2329 - DNA, 20 bp, synthetic construct
  misc_feature 1..20: note = Synthetic Sequence
  source 1..20: mol_type = other DNA
gcctgtaatcccagctctca

SEQ ID NO: 2330 - DNA, 20 bp, synthetic construct
  misc_feature 1..20: note = Synthetic Sequence
  source 1..20: mol_type = other DNA
tccctgactcctccaaggaa

SEQ ID NO: 2331 - DNA, 20 bp, synthetic construct
  misc_feature 1..20: note = Synthetic Sequence
  source 1..20: mol_type = other DNA
aaacttacaattatggcaga

SEQ ID NO: 2332 - DNA, 20 bp, synthetic construct
  misc_feature 1..20: note = Synthetic Sequence
  source 1..20: mol_type = other DNA
aagcttacaatcatggcaga

SEQ ID NO: 2333 - DNA, 20 bp, synthetic construct
  misc_feature 1..20: note = Synthetic Sequence
  source 1..20: mol_type = other DNA
agccagtttattgatctggg

SEQ ID NO: 2334 - DNA, 20 bp, synthetic construct
  misc_feature 1..20: note = Synthetic Sequence
  source 1..20: mol_type = other DNA
gtcaggaaacaacaggtgct

SEQ ID NO: 2335 - DNA, 20 bp, synthetic construct
  misc_feature 1..20: note = Synthetic Sequence
  source 1..20: mol_type = other DNA
ttaagagattaaagtaagac

SEQ ID NO: 2336 - DNA, 20 bp, synthetic construct
  misc_feature 1..20: note = Synthetic Sequence
  source 1..20: mol_type = other DNA
aataggccgtctgcaagctg

SEQ ID NO: 2337 - DNA, 20 bp, synthetic construct
  misc_feature 1..20: note = Synthetic Sequence
  source 1..20: mol_type = other DNA
ctctaccaatcagcaggacg

SEQ ID NO: 2338 - DNA, 20 bp, synthetic construct
  misc_feature 1..20: note = Synthetic Sequence
  source 1..20: mol_type = other DNA
aatggcatgaatccaggagg

SEQ ID NO: 2339 - DNA, 20 bp, synthetic construct
  misc_feature 1..20: note = Synthetic Sequence
  source 1..20: mol_type = other DNA
gcctcagtctcccgaatagc

SEQ ID NO: 2340 - DNA, 20 bp, synthetic construct
  misc_feature 1..20: note = Synthetic Sequence
  source 1..20: mol_type = other DNA
ggggagggagtgtacaaata

SEQ ID NO: 2341 - DNA, 20 bp, synthetic construct
  misc_feature 1..20: note = Synthetic Sequence
  source 1..20: mol_type = other DNA
tattcataattgccaaaact

SEQ ID NO: 2342 - DNA, 20 bp, synthetic construct
  misc_feature 1..20: note = Synthetic Sequence
  source 1..20: mol_type = other DNA
gagcaaacacattcaaaagc

SEQ ID NO: 2343 - DNA, 20 bp, synthetic construct
  misc_feature 1..20: note = Synthetic Sequence
  source 1..20: mol_type = other DNA
gggaactcagaggccggtgc

SEQ ID NO: 2344 - DNA, 20 bp, synthetic construct
  misc_feature 1..20: note = Synthetic Sequence
  source 1..20: mol_type = other DNA
agtatttattgatcatctgt

SEQ ID NO: 2345 - DNA, 20 bp, synthetic construct
  misc_feature 1..20: note = Synthetic Sequence
  source 1..20: mol_type = other DNA
caggagaatggcgcgaacct

SEQ ID NO: 2346 - DNA, 20 bp, synthetic construct
  misc_feature 1..20: note = Synthetic Sequence
  source 1..20: mol_type = other DNA
aggattccctatttagtaaa

SEQ ID NO: 2347 - DNA, 20 bp, synthetic construct
  misc_feature 1..20: note = Synthetic Sequence
  source 1..20: mol_type = other DNA
cagatgatcaataaatacta

SEQ ID NO: 2348 - DNA, 20 bp, synthetic construct
  misc_feature 1..20: note = Synthetic Sequence
  source 1..20: mol_type = other DNA
attcccaccaacagtgtatg

SEQ ID NO: 2349 - DNA, 20 bp, synthetic construct
  misc_feature 1..20: note = Synthetic Sequence
  source 1..20: mol_type = other DNA
gagaatggcgcgaacctggg

SEQ ID NO: 2350 - DNA, 20 bp, synthetic construct
  misc_feature 1..20: note = Synthetic Sequence
  source 1..20: mol_type = other DNA
tagtatttattgatcatctg

SEQ ID NO: 2351 - DNA, 20 bp, synthetic construct
  misc_feature 1..20: note = Synthetic Sequence
  source 1..20: mol_type = other DNA
cgagaccatcctggctatca

SEQ ID NO: 2352 - DNA, 20 bp, synthetic construct
  misc_feature 1..20: note = Synthetic Sequence
  source 1..20: mol_type = other DNA
gtgatgcggccacaagccca

SEQ ID NO: 2353 - DNA, 20 bp, synthetic construct
  misc_feature 1..20: note = Synthetic Sequence
  source 1..20: mol_type = other DNA
acatttatttctcacagttc

SEQ ID NO: 2354 - DNA, 20 bp, synthetic construct
  misc_feature 1..20: note = Synthetic Sequence
  source 1..20: mol_type = other DNA
acaaatatttaaagcatccc

SEQ ID NO: 2355 - DNA, 20 bp, synthetic construct
  misc_feature 1..20: note = Synthetic Sequence
  source 1..20: mol_type = other DNA
ttaatccagtctatcatcgt

SEQ ID NO: 2356 - DNA, 20 bp, synthetic construct
  misc_feature 1..20: note = Synthetic Sequence
  source 1..20: mol_type = other DNA
agatgatcaataaatactaa

SEQ ID NO: 2357 - DNA, 20 bp, synthetic construct
  misc_feature 1..20: note = Synthetic Sequence
  source 1..20: mol_type = other DNA
gacatgtgcccaaggtggtc

SEQ ID NO: 2358 - DNA, 20 bp, synthetic construct
  misc_feature 1..20: note = Synthetic Sequence
  source 1..20: mol_type = other DNA
ggggatgtggcaggacaata

SEQ ID NO: 2359 - DNA, 20 bp, synthetic construct
  misc_feature 1..20: note = Synthetic Sequence
  source 1..20: mol_type = other DNA
caagagaatcgcttgaactc

SEQ ID NO: 2360 - DNA, 20 bp, synthetic construct
  misc_feature 1..20: note = Synthetic Sequence
  source 1..20: mol_type = other DNA
ggggactgttgtgggatggg

SEQ ID NO: 2361 - DNA, 20 bp, synthetic construct
  misc_feature 1..20: note = Synthetic Sequence
  source 1..20: mol_type = other DNA
ggaggcaggcggatcacctg

SEQ ID NO: 2362 - DNA, 20 bp, synthetic construct
  misc_feature 1..20: note = Synthetic Sequence
  source 1..20: mol_type = other DNA
ctggggactgttgtgggatg

SEQ ID NO: 2363 - DNA, 20 bp, synthetic construct
  misc_feature 1..20: note = Synthetic Sequence
  source 1..20: mol_type = other DNA
atttattggatacaagacaa

SEQ ID NO: 2364 - DNA, 20 bp, synthetic construct
  misc_feature 1..20: note = Synthetic Sequence
  source 1..20: mol_type = other DNA
agcagatgggggagccagaa

SEQ ID NO: 2365 - DNA, 20 bp, synthetic construct
  misc_feature 1..20: note = Synthetic Sequence
  source 1..20: mol_type = other DNA
tcaggaaacaacaggtgctg

SEQ ID NO: 2366 - DNA, 20 bp, synthetic construct
  misc_feature 1..20: note = Synthetic Sequence
  source 1..20: mol_type = other DNA
ggaaacaacaggtgctgggg

SEQ ID NO: 2367 - DNA, 20 bp, synthetic construct
  misc_feature 1..20: note = Synthetic Sequence
  source 1..20: mol_type = other DNA
agaatgatacagtggacttt

SEQ ID NO: 2368 - DNA, 20 bp, synthetic construct
  misc_feature 1..20: note = Synthetic Sequence
  source 1..20: mol_type = other DNA
acttatagttccacatggct

SEQ ID NO: 2369 - DNA, 20 bp, synthetic construct
  misc_feature 1..20: note = Synthetic Sequence
  source 1..20: mol_type = other DNA
gcaggagagtggcatgaacc

SEQ ID NO: 2370 - DNA, 20 bp, synthetic construct
  misc_feature 1..20: note = Synthetic Sequence
  source 1..20: mol_type = other DNA
cgatcacaaggtcccacaat

SEQ ID NO: 2371 - DNA, 20 bp, synthetic construct
  misc_feature 1..20: note = Synthetic Sequence
  source 1..20: mol_type = other DNA
caagaccagtctggccaaga

SEQ ID NO: 2372 - DNA, 20 bp, synthetic construct
  misc_feature 1..20: note = Synthetic Sequence
  source 1..20: mol_type = other DNA
cattcaaagcagtgtgtaca

SEQ ID NO: 2373 - DNA, 20 bp, synthetic construct
  misc_feature 1..20: note = Synthetic Sequence
  source 1..20: mol_type = other DNA
aattaaacaatgagaacaca

SEQ ID NO: 2374 - DNA, 20 bp, synthetic construct
  misc_feature 1..20: note = Synthetic Sequence
  source 1..20: mol_type = other DNA
cacagagcttggtgttccaa

SEQ ID NO: 2375 - DNA, 20 bp, synthetic construct
  misc_feature 1..20: note = Synthetic Sequence
  source 1..20: mol_type = other DNA
gagatggggcttctccatgt

SEQ ID NO: 2376 - DNA, 20 bp, synthetic construct
  misc_feature 1..20: note = Synthetic Sequence
  source 1..20: mol_type = other DNA
gtaaactagttcaaccatcg

SEQ ID NO: 2377 - DNA, 20 bp, synthetic construct
  misc_feature 1..20: note = Synthetic Sequence
  source 1..20: mol_type = other DNA
gagaatcccttgaaccaggg

SEQ ID NO: 2378 - DNA, 20 bp, synthetic construct
  misc_feature 1..20: note = Synthetic Sequence
  source 1..20: mol_type = other DNA
aagacatttatgcagccaac

SEQ ID NO: 2379 - DNA, 20 bp, synthetic construct
  misc_feature 1..20: note = Synthetic Sequence
  source 1..20: mol_type = other DNA
tgcgagccttctgttatgcc

SEQ ID NO: 2380 - DNA, 20 bp, synthetic construct
  misc_feature 1..20: note = Synthetic Sequence
  source 1..20: mol_type = other DNA
gcaggacaatagggtaatag

SEQ ID NO: 2381 - DNA, 20 bp, synthetic construct
  misc_feature 1..20: note = Synthetic Sequence
  source 1..20: mol_type = other DNA
tttcaccatgttgtctaggc

SEQ ID NO: 2382 - DNA, 20 bp, synthetic construct
  misc_feature 1..20: note = Synthetic Sequence
  source 1..20: mol_type = other DNA
gagaatctcttgaacttggg

SEQ ID NO: 2383 - DNA, 20 bp, synthetic construct
  misc_feature 1..20: note = Synthetic Sequence
  source 1..20: mol_type = other DNA
ttcttgaacctgggaggtgg

SEQ ID NO: 2384 - DNA, 20 bp, synthetic construct
  misc_feature 1..20: note = Synthetic Sequence
  source 1..20: mol_type = other DNA
ttgaaaactggcaaaagaca

SEQ ID NO: 2385 - DNA, 20 bp, synthetic construct
  misc_feature 1..20: note = Synthetic Sequence
  source 1..20: mol_type = other DNA
aacaggtgctggggaggatg

SEQ ID NO: 2386 - DNA, 20 bp, synthetic construct
  misc_feature 1..20: note = Synthetic Sequence
  source 1..20: mol_type = other DNA
gatacaaagcaaaaggggca

SEQ ID NO: 2387 - DNA, 20 bp, synthetic construct
  misc_feature 1..20: note = Synthetic Sequence
  source 1..20: mol_type = other DNA
aaagaaggaagggctttatt

SEQ ID NO: 2388 - DNA, 20 bp, synthetic construct
  misc_feature 1..20: note = Synthetic Sequence
  source 1..20: mol_type = other DNA
aactgagggaactcagaggc

SEQ ID NO: 2389 - DNA, 20 bp, synthetic construct
  misc_feature 1..20: note = Synthetic Sequence
  source 1..20: mol_type = other DNA
cagaagaatagcttgaacct

SEQ ID NO: 2390 - DNA, 20 bp, synthetic construct
  misc_feature 1..20: note = Synthetic Sequence
  source 1..20: mol_type = other DNA
tgtgagtcatctccaatgat

SEQ ID NO: 2391 - DNA, 20 bp, synthetic construct
  misc_feature 1..20: note = Synthetic Sequence
  source 1..20: mol_type = other DNA
aagaatgatacagtggactt

SEQ ID NO: 2392 - DNA, 20 bp, synthetic construct
  misc_feature 1..20: note = Synthetic Sequence
  source 1..20: mol_type = other DNA
ggaggcaggtggatcacttg

SEQ ID NO: 2393 - DNA, 20 bp, synthetic construct
  misc_feature 1..20: note = Synthetic Sequence
  source 1..20: mol_type = other DNA
caggagaatggcgggaacct

SEQ ID NO: 2394 - DNA, 20 bp, synthetic construct
  misc_feature 1..20: note = Synthetic Sequence
  source 1..20: mol_type = other DNA
aggaggctgacgcaggagaa

SEQ ID NO: 2395 - DNA, 20 bp, synthetic construct
  misc_feature 1..20: note = Synthetic Sequence
  source 1..20: mol_type = other DNA
atgataaatgtttgagatga

SEQ ID NO: 2396 - DNA, 20 bp, synthetic construct
  misc_feature 1..20: note = Synthetic Sequence
  source 1..20: mol_type = other DNA
ggaagtagctctcagcagat

SEQ ID NO: 2397 - DNA, 20 bp, synthetic construct
  misc_feature 1..20: note = Synthetic Sequence
  source 1..20: mol_type = other DNA
aagacaggatttcaccatgt

SEQ ID NO: 2398 - DNA, 20 bp, synthetic construct
  misc_feature 1..20: note = Synthetic Sequence
  source 1..20: mol_type = other DNA
tatgtatacatgtgccatgg

SEQ ID NO: 2399 - DNA, 20 bp, synthetic construct
  misc_feature 1..20: note = Synthetic Sequence
  source 1..20: mol_type = other DNA
aggaggctgaggcagcagaa

SEQ ID NO: 2400 - DNA, 20 bp, synthetic construct
  misc_feature 1..20: note = Synthetic Sequence
  source 1..20: mol_type = other DNA
cagaaggcaaaggggaagca

SEQ ID NO: 2401 - DNA, 20 bp, synthetic construct
  misc_feature 1..20: note = Synthetic Sequence
  source 1..20: mol_type = other DNA
ctttataaattacctagtct

SEQ ID NO: 2402 - DNA, 20 bp, synthetic construct
  misc_feature 1..20: note = Synthetic Sequence
  source 1..20: mol_type = other DNA
agctccagctggcatctggt

SEQ ID NO: 2403 - DNA, 20 bp, synthetic construct
  misc_feature 1..20: note = Synthetic Sequence
  source 1..20: mol_type = other DNA
gccgaggcagggggatcacg

SEQ ID NO: 2404 - DNA, 20 bp, synthetic construct
  misc_feature 1..20: note = Synthetic Sequence
  source 1..20: mol_type = other DNA
aggcagaggttgaaacagtt

SEQ ID NO: 2405 - DNA, 20 bp, synthetic construct
  misc_feature 1..20: note = Synthetic Sequence
  source 1..20: mol_type = other DNA
acacaccggggcctgtcagg

SEQ ID NO: 2406 - DNA, 20 bp, synthetic construct
  misc_feature 1..20: note = Synthetic Sequence
  source 1..20: mol_type = other DNA
gagagtggcgtgaacccagg

SEQ ID NO: 2407 - DNA, 20 bp, synthetic construct
  misc_feature 1..20: note = Synthetic Sequence
  source 1..20: mol_type = other DNA
atgagccagtttattgatct

SEQ ID NO: 2408 - DNA, 20 bp, synthetic construct
  misc_feature 1..20: note = Synthetic Sequence
  source 1..20: mol_type = other DNA
caggagaatctcttgaactt

SEQ ID NO: 2409 - DNA, 20 bp, synthetic construct
  misc_feature 1..20: note = Synthetic Sequence
  source 1..20: mol_type = other DNA
tgcttcaacccaggaggtgg

SEQ ID NO: 2410 - DNA, 20 bp, synthetic construct
  misc_feature 1..20: note = Synthetic Sequence
  source 1..20: mol_type = other DNA
gtcgaggtgggtggatcacg

SEQ ID NO: 2411 - DNA, 20 bp, synthetic construct
  misc_feature 1..20: note = Synthetic Sequence
  source 1..20: mol_type = other DNA
ttcttgatctgtccccaggt

SEQ ID NO: 2412 - DNA, 20 bp, synthetic construct
  misc_feature 1..20: note = Synthetic Sequence
  source 1..20: mol_type = other DNA
ttcccaccaacagtgtatga

SEQ ID NO: 2413 - DNA, 20 bp, synthetic construct
  misc_feature 1..20: note = Synthetic Sequence
  source 1..20: mol_type = other DNA
gattgagagacacacatagc

SEQ ID NO: 2414 - DNA, 20 bp, synthetic construct
  misc_feature 1..20: note = Synthetic Sequence
  source 1..20: mol_type = other DNA
cacttgagcccagaaggttg

SEQ ID NO: 2415 - DNA, 20 bp, synthetic construct
  misc_feature 1..20: note = Synthetic Sequence
  source 1..20: mol_type = other DNA
aaccatcgtggaagtcagtg

SEQ ID NO: 2416 - DNA, 20 bp, synthetic construct
  misc_feature 1..20: note = Synthetic Sequence
  source 1..20: mol_type = other DNA
taagattagagcagaactga

SEQ ID NO: 2417 - DNA, 20 bp, synthetic construct
  misc_feature 1..20: note = Synthetic Sequence
  source 1..20: mol_type = other DNA
gatgagccagtttattgatc

SEQ ID NO: 2418 - DNA, 20 bp, synthetic construct
  misc_feature 1..20: note = Synthetic Sequence
  source 1..20: mol_type = other DNA
tggggactgttgtgggatgg

SEQ ID NO: 2419 - DNA, 20 bp, synthetic construct
  misc_feature 1..20: note = Synthetic Sequence
  source 1..20: mol_type = other DNA
tttatactttggtttagaaa

SEQ ID NO: 2420 - DNA, 20 bp, synthetic construct
  misc_feature 1..20: note = Synthetic Sequence
  source 1..20: mol_type = other DNA
aggagaaggccacgtggaga

SEQ ID NO: 2421 - DNA, 20 bp, synthetic construct
  misc_feature 1..20: note = Synthetic Sequence
  source 1..20: mol_type = other DNA
catctatggagataatcatg

SEQ ID NO: 2422 - DNA, 20 bp, synthetic construct
  misc_feature 1..20: note = Synthetic Sequence
  source 1..20: mol_type = other DNA
gaatgatacagtggactttg

SEQ ID NO: 2423 - DNA, 20 bp, synthetic construct
  misc_feature 1..20: note = Synthetic Sequence
  source 1..20: mol_type = other DNA
taaaaacaagaaatggggaa

SEQ ID NO: 2424 - DNA, 20 bp, synthetic construct
  misc_feature 1..20: note = Synthetic Sequence
  source 1..20: mol_type = other DNA
gactcacagttccacatggt

SEQ ID NO: 2425 - DNA, 20 bp, synthetic construct
  misc_feature 1..20: note = Synthetic Sequence
  source 1..20: mol_type = other DNA
ttcacttgcttcaggccatc

SEQ ID NO: 2426 - DNA, 20 bp, synthetic construct
  misc_feature 1..20: note = Synthetic Sequence
  source 1..20: mol_type = other DNA
aattcacaattgcaaaatcg

SEQ ID NO: 2427 - DNA, 20 bp, synthetic construct
  misc_feature 1..20: note = Synthetic Sequence
  source 1..20: mol_type = other DNA
taatgtaaatgaagagttaa

SEQ ID NO: 2428 - DNA, 20 bp, synthetic construct
  misc_feature 1..20: note = Synthetic Sequence
  source 1..20: mol_type = other DNA
aatgtaaatgaagagttaat

SEQ ID NO: 2429 - DNA, 20 bp, synthetic construct
  misc_feature 1..20: note = Synthetic Sequence
  source 1..20: mol_type = other DNA
aaagaaggaaggggtttatt

SEQ ID NO: 2430 - DNA, 20 bp, synthetic construct
  misc_feature 1..20: note = Synthetic Sequence
  source 1..20: mol_type = other DNA
tattaactcacacgatcaca

SEQ ID NO: 2431 - DNA, 20 bp, synthetic construct
  misc_feature 1..20: note = Synthetic Sequence
  source 1..20: mol_type = other DNA
acatatgtatacatgtgcca

SEQ ID NO: 2432 - DNA, 20 bp, synthetic construct
  misc_feature 1..20: note = Synthetic Sequence
  source 1..20: mol_type = other DNA
gtcatctccaatgataggta

SEQ ID NO: 2433 - DNA, 20 bp, synthetic construct
  misc_feature 1..20: note = Synthetic Sequence
  source 1..20: mol_type = other DNA
tgcttaaacccgggaggtgg

SEQ ID NO: 2434 - DNA, 20 bp, synthetic construct
  misc_feature 1..20: note = Synthetic Sequence
  source 1..20: mol_type = other DNA
ggtaaggtcacagaatctca

SEQ ID NO: 2435 - DNA, 20 bp, synthetic construct
  misc_feature 1..20: note = Synthetic Sequence
  source 1..20: mol_type = other DNA
ggagaatggcgtgaaccggg

SEQ ID NO: 2436 - DNA, 20 bp, synthetic construct
  misc_feature 1..20: note = Synthetic Sequence
  source 1..20: mol_type = other DNA
gcagcataagtggctggcag

SEQ ID NO: 2437 - DNA, 20 bp, synthetic construct
  misc_feature 1..20: note = Synthetic Sequence
  source 1..20: mol_type = other DNA
tttattggaatagtttcaga

SEQ ID NO: 2438 - DNA, 20 bp, synthetic construct
  misc_feature 1..20: note = Synthetic Sequence
  source 1..20: mol_type = other DNA
ggtggaaggcacctcttcac

SEQ ID NO: 2439 - DNA, 20 bp, synthetic construct
  misc_feature 1..20: note = Synthetic Sequence
  source 1..20: mol_type = other DNA
gtggaaggcacctcttcaca

SEQ ID NO: 2440 - DNA, 20 bp, synthetic construct
  misc_feature 1..20: note = Synthetic Sequence
  source 1..20: mol_type = other DNA
aaagaaaagacagctgggcc

SEQ ID NO: 2441 - DNA, 20 bp, synthetic construct
  misc_feature 1..20: note = Synthetic Sequence
  source 1..20: mol_type = other DNA
gctgaggctggtggatcacg

SEQ ID NO: 2442 - DNA, 20 bp, synthetic construct
  misc_feature 1..20: note = Synthetic Sequence
  source 1..20: mol_type = other DNA
gggcaggggtgggggtcaca

SEQ ID NO: 2443 - DNA, 20 bp, synthetic construct
  misc_feature 1..20: note = Synthetic Sequence
  source 1..20: mol_type = other DNA
ggtacatgtacacaacatgc

SEQ ID NO: 2444 - DNA, 20 bp, synthetic construct
  misc_feature 1..20: note = Synthetic Sequence
  source 1..20: mol_type = other DNA
atattaaccttaaaggtaaa

SEQ ID NO: 2445 - DNA, 20 bp, synthetic construct
  misc_feature 1..20: note = Synthetic Sequence
  source 1..20: mol_type = other DNA
ctagctacttcctgctggat

SEQ ID NO: 2446 - DNA, 20 bp, synthetic construct
  misc_feature 1..20: note = Synthetic Sequence
  source 1..20: mol_type = other DNA
aaatttacaatcatggcaga

SEQ ID NO: 2447 - DNA, 20 bp, synthetic construct
  misc_feature 1..20: note = Synthetic Sequence
  source 1..20: mol_type = other DNA
cacatggctgaggaggcctc

SEQ ID NO: 2448 - DNA, 20 bp, synthetic construct
  misc_feature 1..20: note = Synthetic Sequence
  source 1..20: mol_type = other DNA
cagaggttgaaacagtttgg

SEQ ID NO: 2449 - DNA, 20 bp, synthetic construct
  misc_feature 1..20: note = Synthetic Sequence
  source 1..20: mol_type = other DNA
cataacaatattaaccttaa

SEQ ID NO: 2450 - DNA, 20 bp, synthetic construct
  misc_feature 1..20: note = Synthetic Sequence
  source 1..20: mol_type = other DNA
aggcagaggttggaagagtt

SEQ ID NO: 2451 - DNA, 20 bp, synthetic construct
  misc_feature 1..20: note = Synthetic Sequence
  source 1..20: mol_type = other DNA
tattaaccttaaaggtaaat

SEQ ID NO: 2452 - DNA, 20 bp, synthetic construct
  misc_feature 1..20: note = Synthetic Sequence
  source 1..20: mol_type = other DNA
gtggagacggaggcagagac

SEQ ID NO: 2453 - DNA, 20 bp, synthetic construct
  misc_feature 1..20: note = Synthetic Sequence
  source 1..20: mol_type = other DNA
gtgccgaggcaagagactga

SEQ ID NO: 2454 - DNA, 20 bp, synthetic construct
  misc_feature 1..20: note = Synthetic Sequence
  source 1..20: mol_type = other DNA
aagacaaggtttcaccatgt

SEQ ID NO: 2455 - DNA, 20 bp, synthetic construct
  misc_feature 1..20: note = Synthetic Sequence
  source 1..20: mol_type = other DNA
tctctagctgtgcagctgca

SEQ ID NO: 2456 - DNA, 20 bp, synthetic construct
  misc_feature 1..20: note = Synthetic Sequence
  source 1..20: mol_type = other DNA
tagctaatctagtggggatg

SEQ ID NO: 2457 - DNA, 20 bp, synthetic construct
  misc_feature 1..20: note = Synthetic Sequence
  source 1..20: mol_type = other DNA
cataagaatcgcttgaaccc

SEQ ID NO: 2458 - DNA, 20 bp, synthetic construct
  misc_feature 1..20: note = Synthetic Sequence
  source 1..20: mol_type = other DNA
gagatgaggtttcaccatgc

SEQ ID NO: 2459 - DNA, 20 bp, synthetic construct
  misc_feature 1..20: note = Synthetic Sequence
  source 1..20: mol_type = other DNA
atggcatctgtaaactgtca

SEQ ID NO: 2460 - DNA, 20 bp, synthetic construct
  misc_feature 1..20: note = Synthetic Sequence
  source 1..20: mol_type = other DNA
gccagagaatcgcttgaacc

SEQ ID NO: 2461 - DNA, 20 bp, synthetic construct
  misc_feature 1..20: note = Synthetic Sequence
  source 1..20: mol_type = other DNA
ttctcagggctgcttcgagt

SEQ ID NO: 2462 - DNA, 20 bp, synthetic construct
  misc_feature 1..20: note = Synthetic Sequence
  source 1..20: mol_type = other DNA
caaggcagacggatcacctg

SEQ ID NO: 2463 - DNA, 20 bp, synthetic construct
  misc_feature 1..20: note = Synthetic Sequence
  source 1..20: mol_type = other DNA
gtctaccattgatggacatt

SEQ ID NO: 2464 - DNA, 20 bp, synthetic construct
  misc_feature 1..20: note = Synthetic Sequence
  source 1..20: mol_type = other DNA
agcttatgtacatgtatgtg

SEQ ID NO: 2465 - DNA, 20 bp, synthetic construct
  misc_feature 1..20: note = Synthetic Sequence
  source 1..20: mol_type = other DNA
atttagcccatttaccttta

SEQ ID NO: 2466 - DNA, 20 bp, synthetic construct
  misc_feature 1..20: note = Synthetic Sequence
  source 1..20: mol_type = other DNA
accccaggtcagagaacaaa

SEQ ID NO: 2467 - DNA, 20 bp, synthetic construct
  misc_feature 1..20: note = Synthetic Sequence
  source 1..20: mol_type = other DNA
atcaggtgatccacccgcct

SEQ ID NO: 2468 - DNA, 20 bp, synthetic construct
  misc_feature 1..20: note = Synthetic Sequence
  source 1..20: mol_type = other DNA
tgggtactatgctcactacc

SEQ ID NO: 2469 - DNA, 20 bp, synthetic construct
  misc_feature 1..20: note = Synthetic Sequence
  source 1..20: mol_type = other DNA
gcctaggtgggcggatcacg

SEQ ID NO: 2470 - DNA, 20 bp, synthetic construct
  misc_feature 1..20: note = Synthetic Sequence
  source 1..20: mol_type = other DNA
aaggaatgtagtaggagagc

SEQ ID NO: 2471 - DNA, 20 bp, synthetic construct
  misc_feature 1..20: note = Synthetic Sequence
  source 1..20: mol_type = other DNA
tcctgaatacagcaccctga

SEQ ID NO: 2472 - DNA, 20 bp, synthetic construct
  misc_feature 1..20: note = Synthetic Sequence
  source 1..20: mol_type = other DNA
ttaatccagtctaccattga

SEQ ID NO: 2473 - DNA, 20 bp, synthetic construct
  misc_feature 1..20: note = Synthetic Sequence
  source 1..20: mol_type = other DNA
atgagttcctgtcctttgca

SEQ ID NO: 2474 - DNA, 20 bp, synthetic construct
  misc_feature 1..20: note = Synthetic Sequence
  source 1..20: mol_type = other DNA
gcttcagcctctcgagtagc

SEQ ID NO: 2475 - DNA, 20 bp, synthetic construct
  misc_feature 1..20: note = Synthetic Sequence
  source 1..20: mol_type = other DNA
tttgaaaactggcaaaagac

SEQ ID NO: 2476 - DNA, 20 bp, synthetic construct
  misc_feature 1..20: note = Synthetic Sequence
  source 1..20: mol_type = other DNA
caatcagcaggacatgggtg

SEQ ID NO: 2477 - DNA, 20 bp, synthetic construct
  misc_feature 1..20: note = Synthetic Sequence
  source 1..20: mol_type = other DNA
attaactcttcatttacatt

SEQ ID NO: 2478 - DNA, 20 bp, synthetic construct
  misc_feature 1..20: note = Synthetic Sequence
  source 1..20: mol_type = other DNA
aggacaatagggtaatagtg

SEQ ID NO: 2479 - DNA, 20 bp, synthetic construct
  misc_feature 1..20: note = Synthetic Sequence
  source 1..20: mol_type = other DNA
ttatactttggtttagaaag

SEQ ID NO: 2480 - DNA, 20 bp, synthetic construct
  misc_feature 1..20: note = Synthetic Sequence
  source 1..20: mol_type = other DNA
aatgaagctgcggaccctcg

SEQ ID NO: 2481 - DNA, 20 bp, synthetic construct
  misc_feature 1..20: note = Synthetic Sequence
  source 1..20: mol_type = other DNA
gagaatctcttgaacctgag

SEQ ID NO: 2482 - DNA, 20 bp, synthetic construct
  misc_feature 1..20: note = Synthetic Sequence
  source 1..20: mol_type = other DNA
aggaatgtagtaggagagca

SEQ ID NO: 2483 - DNA, 20 bp, synthetic construct
  misc_feature 1..20: note = Synthetic Sequence
  source 1..20: mol_type = other DNA
aagaattgcttgaacctgga

SEQ ID NO: 2484 - DNA, 20 bp, synthetic construct
  misc_feature 1..20: note = Synthetic Sequence
  source 1..20: mol_type = other DNA
attaaaatcctcctctgctg

SEQ ID NO: 2485 - DNA, 20 bp, synthetic construct
  misc_feature 1..20: note = Synthetic Sequence
  source 1..20: mol_type = other DNA
caaaaagttaaaaggataaa

SEQ ID NO: 2486 - DNA, 20 bp, synthetic construct
  misc_feature 1..20: note = Synthetic Sequence
  source 1..20: mol_type = other DNA
ttaataaattaggtattgat

SEQ ID NO: 2487 - DNA, 20 bp, synthetic construct
  misc_feature 1..20: note = Synthetic Sequence
  source 1..20: mol_type = other DNA
tttctacttctagatccttg

SEQ ID NO: 2488 - DNA, 20 bp, synthetic construct
  misc_feature 1..20: note = Synthetic Sequence
  source 1..20: mol_type = other DNA
cgaaaatgtggaagcaactt

SEQ ID NO: 2489 - DNA, 20 bp, synthetic construct
  misc_feature 1..20: note = Synthetic Sequence
  source 1..20: mol_type = other DNA
cttaataaattaggtattga

SEQ ID NO: 2490 - DNA, 20 bp, synthetic construct
  misc_feature 1..20: note = Synthetic Sequence
  source 1..20: mol_type = other DNA
caaccaagatgtccttcagt

SEQ ID NO: 2491 - DNA, 20 bp, synthetic construct
  misc_feature 1..20: note = Synthetic Sequence
  source 1..20: mol_type = other DNA
gaggagaatggcatgaaccc

SEQ ID NO: 2492 - DNA, 20 bp, synthetic construct
  misc_feature 1..20: note = Synthetic Sequence
  source 1..20: mol_type = other DNA
ccaatcagcaggacatgggt

SEQ ID NO: 2493 - DNA, 20 bp, synthetic construct
  misc_feature 1..20: note = Synthetic Sequence
  source 1..20: mol_type = other DNA
acctctaatcccagctactt

SEQ ID NO: 2494 - DNA, 20 bp, synthetic construct
  misc_feature 1..20: note = Synthetic Sequence
  source 1..20: mol_type = other DNA
cccacccatgtcctgctgat

SEQ ID NO: 2495 - DNA, 20 bp, synthetic construct
  misc_feature 1..20: note = Synthetic Sequence
  source 1..20: mol_type = other DNA
gtcagcaaagggagatgggg

SEQ ID NO: 2496 - DNA, 20 bp, synthetic construct
  misc_feature 1..20: note = Synthetic Sequence
  source 1..20: mol_type = other DNA
cgagagcagcctggccaata

SEQ ID NO: 2497 - DNA, 20 bp, synthetic construct
  misc_feature 1..20: note = Synthetic Sequence
  source 1..20: mol_type = other DNA
tcagcaaagggagatggggt

SEQ ID NO: 2498 - DNA, 20 bp, synthetic construct
  misc_feature 1..20: note = Synthetic Sequence
  source 1..20: mol_type = other DNA
ggctcacagttccacatggc

SEQ ID NO: 2499 - DNA, 20 bp, synthetic construct
  misc_feature 1..20: note = Synthetic Sequence
  source 1..20: mol_type = other DNA
caggacaatagggtaatagt

SEQ ID NO: 2500 - DNA, 20 bp, synthetic construct
  misc_feature 1..20: note = Synthetic Sequence
  source 1..20: mol_type = other DNA
gtgaagcctccccagccatg

SEQ ID NO: 2501 - DNA, 20 bp, synthetic construct
  misc_feature 1..20: note = Synthetic Sequence
  source 1..20: mol_type = other DNA
cagcaaagggagatggggtg

SEQ ID NO: 2502 - DNA, 20 bp, synthetic construct
  misc_feature 1..20: note = Synthetic Sequence
  source 1..20: mol_type = other DNA
cccatcagggtgctgtattc

SEQ ID NO: 2503 - DNA, 20 bp, synthetic construct
  misc_feature 1..20: note = Synthetic Sequence
  source 1..20: mol_type = other DNA
aaaacatcaatatagccatc

SEQ ID NO: 2504 - DNA, 20 bp, synthetic construct
  misc_feature 1..20: note = Synthetic Sequence
  source 1..20: mol_type = other DNA
tttattggatacaagacaaa

SEQ ID NO: 2505 - DNA, 20 bp, synthetic construct
  misc_feature 1..20: note = Synthetic Sequence
  source 1..20: mol_type = other DNA
accgaggcaggtggatcacg

SEQ ID NO: 2506 - DNA, 20 bp, synthetic construct
  misc_feature 1..20: note = Synthetic Sequence
  source 1..20: mol_type = other DNA
caccacccagatcaataaac

SEQ ID NO: 2507 - DNA, 20 bp, synthetic construct
  misc_feature 1..20: note = Synthetic Sequence
  source 1..20: mol_type = other DNA
cattaaggtcaggtgtgcct

SEQ ID NO: 2508 - DNA, 20 bp, synthetic construct
  misc_feature 1..20: note = Synthetic Sequence
  source 1..20: mol_type = other DNA
gagaatagtgtgaacccagg

SEQ ID NO: 2509 - DNA, 20 bp, synthetic construct
  misc_feature 1..20: note = Synthetic Sequence
  source 1..20: mol_type = other DNA
tagactggataaagaaagtg

SEQ ID NO: 2510 - DNA, 20 bp, synthetic construct
  misc_feature 1..20: note = Synthetic Sequence
  source 1..20: mol_type = other DNA
ggtgaaaggcacgtctcaca

SEQ ID NO: 2511 - DNA, 20 bp, synthetic construct
  misc_feature 1..20: note = Synthetic Sequence
  source 1..20: mol_type = other DNA
tcgtgatcgattgagcaagc

SEQ ID NO: 2512 - DNA, 20 bp, synthetic construct
  misc_feature 1..20: note = Synthetic Sequence
  source 1..20: mol_type = other DNA
tttcaccctattggccaggc

SEQ ID NO: 2513 - DNA, 20 bp, synthetic construct
  misc_feature 1..20: note = Synthetic Sequence
  source 1..20: mol_type = other DNA
aagagaacccttaatcctaa

SEQ ID NO: 2514 - DNA, 20 bp, synthetic construct
  misc_feature 1..20: note = Synthetic Sequence
  source 1..20: mol_type = other DNA
caggcaccttcttcacaagg

SEQ ID NO: 2515 - DNA, 20 bp, synthetic construct
  misc_feature 1..20: note = Synthetic Sequence
  source 1..20: mol_type = other DNA
aaagtagccaggcatggtgg

SEQ ID NO: 2516 - DNA, 20 bp, synthetic construct
  misc_feature 1..20: note = Synthetic Sequence
  source 1..20: mol_type = other DNA
cctgaatacagcaccctgat

SEQ ID NO: 2517 - DNA, 20 bp, synthetic construct
  misc_feature 1..20: note = Synthetic Sequence
  source 1..20: mol_type = other DNA
gcattaaggtcaggtgtgcc

SEQ ID NO: 2518 - DNA, 20 bp, synthetic construct
  misc_feature 1..20: note = Synthetic Sequence
  source 1..20: mol_type = other DNA
cgagaccagtctggctaaca

SEQ ID NO: 2519 - DNA, 20 bp, synthetic construct
  misc_feature 1..20: note = Synthetic Sequence
  source 1..20: mol_type = other DNA
gggctcacctcttgccttct

SEQ ID NO: 2520 - DNA, 20 bp, synthetic construct
  misc_feature 1..20: note = Synthetic Sequence
  source 1..20: mol_type = other DNA
gagaaacaacagtgggccca

SEQ ID NO: 2521 - DNA, 20 bp, synthetic construct
  misc_feature 1..20: note = Synthetic Sequence
  source 1..20: mol_type = other DNA
gcaagcagggggtacatgac

SEQ ID NO: 2522 - DNA, 20 bp, synthetic construct
  misc_feature 1..20: note = Synthetic Sequence
  source 1..20: mol_type = other DNA
tttataaattacctagtctt

SEQ ID NO: 2523 - DNA, 20 bp, synthetic construct
  misc_feature 1..20: note = Synthetic Sequence
  source 1..20: mol_type = other DNA
gggaccccgaacggagggac

SEQ ID NO: 2524 - DNA, 20 bp, synthetic construct
  misc_feature 1..20: note = Synthetic Sequence
  source 1..20: mol_type = other DNA
taggattgacttggcgatga

SEQ ID NO: 2525 - DNA, 20 bp, synthetic construct
  misc_feature 1..20: note = Synthetic Sequence
  source 1..20: mol_type = other DNA
agggaaccctcatacactgt

SEQ ID NO: 2526 - DNA, 20 bp, synthetic construct
  misc_feature 1..20: note = Synthetic Sequence
  source 1..20: mol_type = other DNA
agaatggaacagaacaggac

SEQ ID NO: 2527 - DNA, 20 bp, synthetic construct
  misc_feature 1..20: note = Synthetic Sequence
  source 1..20: mol_type = other DNA
actcacagttccacatggtt

SEQ ID NO: 2528 - DNA, 20 bp, synthetic construct
  misc_feature 1..20: note = Synthetic Sequence
  source 1..20: mol_type = other DNA
tcagaggccggtgccggtgc

SEQ ID NO: 2529 - DNA, 20 bp, synthetic construct
  misc_feature 1..20: note = Synthetic Sequence
  source 1..20: mol_type = other DNA
ccatgattctaagtttcctg

SEQ ID NO: 2530 - DNA, 20 bp, synthetic construct
  misc_feature 1..20: note = Synthetic Sequence
  source 1..20: mol_type = other DNA
cctcaggaaacttagaatca

SEQ ID NO: 2531 - DNA, 20 bp, synthetic construct
  misc_feature 1..20: note = Synthetic Sequence
  source 1..20: mol_type = other DNA
ttgaccaaggagccctcaag

SEQ ID NO: 2532 - DNA, 20 bp, synthetic construct
  misc_feature 1..20: note = Synthetic Sequence
  source 1..20: mol_type = other DNA
ataagtggctggcagaggca

SEQ ID NO: 2533 - DNA, 20 bp, synthetic construct
  misc_feature 1..20: note = Synthetic Sequence
  source 1..20: mol_type = other DNA
tttcaccgtgatagccagga

SEQ ID NO: 2534 - DNA, 20 bp, synthetic construct
  misc_feature 1..20: note = Synthetic Sequence
  source 1..20: mol_type = other DNA
agagacagggttcaccatgt

SEQ ID NO: 2535 - DNA, 20 bp, synthetic construct
  misc_feature 1..20: note = Synthetic Sequence
  source 1..20: mol_type = other DNA
agaacagcagcataagtggc

SEQ ID NO: 2536 - DNA, 20 bp, synthetic construct
  misc_feature 1..20: note = Synthetic Sequence
  source 1..20: mol_type = other DNA
ctcacagttccacatggttg

SEQ ID NO: 2537 - DNA, 20 bp, synthetic construct
  misc_feature 1..20: note = Synthetic Sequence
  source 1..20: mol_type = other DNA
cagaagttggaacagtttgg

SEQ ID NO: 2538 - DNA, 20 bp, synthetic construct
  misc_feature 1..20: note = Synthetic Sequence
  source 1..20: mol_type = other DNA
attcaccatgttggtcaggc

SEQ ID NO: 2539 - DNA, 20 bp, synthetic construct
  misc_feature 1..20: note = Synthetic Sequence
  source 1..20: mol_type = other DNA
caatcagcaggacatgggca

SEQ ID NO: 2540 - DNA, 20 bp, synthetic construct
  misc_feature 1..20: note = Synthetic Sequence
  source 1..20: mol_type = other DNA
cagcaagaccaagaacccac

SEQ ID NO: 2541 - DNA, 20 bp, synthetic construct
  misc_feature 1..20: note = Synthetic Sequence
  source 1..20: mol_type = other DNA
aaagacacagacaggcaaat

SEQ ID NO: 2542 - DNA, 20 bp, synthetic construct
  misc_feature 1..20: note = Synthetic Sequence
  source 1..20: mol_type = other DNA
gcaggagaatgttgtgaacc

SEQ ID NO: 2543 - DNA, 20 bp, synthetic construct
  misc_feature 1..20: note = Synthetic Sequence
  source 1..20: mol_type = other DNA
actcacagttctgcattgct

SEQ ID NO: 2544 - DNA, 20 bp, synthetic construct
  misc_feature 1..20: note = Synthetic Sequence
  source 1..20: mol_type = other DNA
gccaagacaggcggatcacg

SEQ ID NO: 2545 - DNA, 20 bp, synthetic construct
  misc_feature 1..20: note = Synthetic Sequence
  source 1..20: mol_type = other DNA
atgggagaattgcttgaacc

SEQ ID NO: 2546 - DNA, 20 bp, synthetic construct
  misc_feature 1..20: note = Synthetic Sequence
  source 1..20: mol_type = other DNA
atgacagtttacagatgcca

SEQ ID NO: 2547 - DNA, 20 bp, synthetic construct
  misc_feature 1..20: note = Synthetic Sequence
  source 1..20: mol_type = other DNA
tgtaaaatggaccaatcagt

SEQ ID NO: 2548 - DNA, 20 bp, synthetic construct
  misc_feature 1..20: note = Synthetic Sequence
  source 1..20: mol_type = other DNA
gaatggaacagaacaggaca

SEQ ID NO: 2549 - DNA, 20 bp, synthetic construct
  misc_feature 1..20: note = Synthetic Sequence
  source 1..20: mol_type = other DNA
cgtgatcgattgagcaagca

SEQ ID NO: 2550 - DNA, 20 bp, synthetic construct
  misc_feature 1..20: note = Synthetic Sequence
  source 1..20: mol_type = other DNA
tccaagttggcaccagagtg

SEQ ID NO: 2551 - DNA, 20 bp, synthetic construct
  misc_feature 1..20: note = Synthetic Sequence
  source 1..20: mol_type = other DNA
agaacacctggacacagggt

SEQ ID NO: 2552 - DNA, 20 bp, synthetic construct
  misc_feature 1..20: note = Synthetic Sequence
  source 1..20: mol_type = other DNA
aaacatcaatatagccatca

SEQ ID NO: 2553 - DNA, 20 bp, synthetic construct
  misc_feature 1..20: note = Synthetic Sequence
  source 1..20: mol_type = other DNA
ataaattcctaaagacaaag

SEQ ID NO: 2554 - DNA, 20 bp, synthetic construct
  misc_feature 1..20: note = Synthetic Sequence
  source 1..20: mol_type = other DNA
ggcagaagaatcgcttgaac

SEQ ID NO: 2555 - DNA, 20 bp, synthetic construct
  misc_feature 1..20: note = Synthetic Sequence
  source 1..20: mol_type = other DNA
cgcttgaacccaggtggcgg

SEQ ID NO: 2556 - DNA, 20 bp, synthetic construct
  misc_feature 1..20: note = Synthetic Sequence
  source 1..20: mol_type = other DNA
caagagaatcgcttgaatcc

SEQ ID NO: 2557 - DNA, 20 bp, synthetic construct
  misc_feature 1..20: note = Synthetic Sequence
  source 1..20: mol_type = other DNA
ttccaataaatagaaaaaga

SEQ ID NO: 2558 - DNA, 20 bp, synthetic construct
  misc_feature 1..20: note = Synthetic Sequence
  source 1..20: mol_type = other DNA
agtttagtgagggcgggggt

SEQ ID NO: 2559 - DNA, 20 bp, synthetic construct
  misc_feature 1..20: note = Synthetic Sequence
  source 1..20: mol_type = other DNA
aaatacctaatgtaaatgac

SEQ ID NO: 2560 - DNA, 20 bp, synthetic construct
  misc_feature 1..20: note = Synthetic Sequence
  source 1..20: mol_type = other DNA
tcacaaggtaaatggaggca

SEQ ID NO: 2561 - DNA, 20 bp, synthetic construct
  misc_feature 1..20: note = Synthetic Sequence
  source 1..20: mol_type = other DNA
tcataaataagtttaaggaa

SEQ ID NO: 2562 - DNA, 20 bp, synthetic construct
  misc_feature 1..20: note = Synthetic Sequence
  source 1..20: mol_type = other DNA
tcaggagttcgagacccgcc

SEQ ID NO: 2563 - DNA, 20 bp, synthetic construct
  misc_feature 1..20: note = Synthetic Sequence
  source 1..20: mol_type = other DNA
ttgagggctccttggtcaag

SEQ ID NO: 2564 - DNA, 20 bp, synthetic construct
  misc_feature 1..20: note = Synthetic Sequence
  source 1..20: mol_type = other DNA
tacattccagcctttgtata

SEQ ID NO: 2565 - DNA, 20 bp, synthetic construct
  misc_feature 1..20: note = Synthetic Sequence
  source 1..20: mol_type = other DNA
atctcagtcaggtcaatgat

SEQ ID NO: 2566 - DNA, 20 bp, synthetic construct
  misc_feature 1..20: note = Synthetic Sequence
  source 1..20: mol_type = other DNA
acaggtaaacttgtgtcatg

SEQ ID NO: 2567 - DNA, 20 bp, synthetic construct
  misc_feature 1..20: note = Synthetic Sequence
  source 1..20: mol_type = other DNA
tacaaagggaggggacccaa

SEQ ID NO: 2568 - DNA, 20 bp, synthetic construct
  misc_feature 1..20: note = Synthetic Sequence
  source 1..20: mol_type = other DNA
tgcaggctgtacaagaagca

SEQ ID NO: 2569 - DNA, 20 bp, synthetic construct
  misc_feature 1..20: note = Synthetic Sequence
  source 1..20: mol_type = other DNA
ttattagggactttcaaaag

SEQ ID NO: 2570 - DNA, 20 bp, synthetic construct
  misc_feature 1..20: note = Synthetic Sequence
  source 1..20: mol_type = other DNA
atcacaaggtaaatggaggc

SEQ ID NO: 2571 - DNA, 20 bp, synthetic construct
  misc_feature 1..20: note = Synthetic Sequence
  source 1..20: mol_type = other DNA
attggacttatagttccaca

SEQ ID NO: 2572 - DNA, 20 bp, synthetic construct
  misc_feature 1..20: note = Synthetic Sequence
  source 1..20: mol_type = other DNA
taaattcctaaagacaaagt

SEQ ID NO: 2573 - DNA, 20 bp, synthetic construct
  misc_feature 1..20: note = Synthetic Sequence
  source 1..20: mol_type = other DNA
acagatgttctgtgagaggg

SEQ ID NO: 2574 - DNA, 20 bp, synthetic construct
  misc_feature 1..20: note = Synthetic Sequence
  source 1..20: mol_type = other DNA
caggtaaacttgtgtcatgg

SEQ ID NO: 2575 - DNA, 20 bp, synthetic construct
  misc_feature 1..20: note = Synthetic Sequence
  source 1..20: mol_type = other DNA
agaagttggaacagtttgga

SEQ ID NO: 2576 - DNA, 20 bp, synthetic construct
  misc_feature 1..20: note = Synthetic Sequence
  source 1..20: mol_type = other DNA
gggtatattgtgtgatgctg

SEQ ID NO: 2577 - DNA, 20 bp, synthetic construct
  misc_feature 1..20: note = Synthetic Sequence
  source 1..20: mol_type = other DNA
tttggagaataaacctgaga

SEQ ID NO: 2578 - DNA, 20 bp, synthetic construct
  misc_feature 1..20: note = Synthetic Sequence
  source 1..20: mol_type = other DNA
gaaaatggtgtgaacctggg

SEQ ID NO: 2579 - DNA, 20 bp, synthetic construct
  misc_feature 1..20: note = Synthetic Sequence
  source 1..20: mol_type = other DNA
agaaacaacagtgggcccag

SEQ ID NO: 2580 - DNA, 20 bp, synthetic construct
  misc_feature 1..20: note = Synthetic Sequence
  source 1..20: mol_type = other DNA
tcaacagatgttctgtgaga

SEQ ID NO: 2581 - DNA, 20 bp, synthetic construct
  misc_feature 1..20: note = Synthetic Sequence
  source 1..20: mol_type = other DNA
tttatccattcacctactga

SEQ ID NO: 2582 - DNA, 20 bp, synthetic construct
  misc_feature 1..20: note = Synthetic Sequence
  source 1..20: mol_type = other DNA
cgcttgaagctgggaggcag

SEQ ID NO: 2583 - DNA, 20 bp, synthetic construct
  misc_feature 1..20: note = Synthetic Sequence
  source 1..20: mol_type = other DNA
ggtatagggtcaggtgctga

SEQ ID NO: 2584 - DNA, 20 bp, synthetic construct
  misc_feature 1..20: note = Synthetic Sequence
  source 1..20: mol_type = other DNA
tttgccagctaaagctaaag

SEQ ID NO: 2585 - DNA, 20 bp, synthetic construct
  misc_feature 1..20: note = Synthetic Sequence
  source 1..20: mol_type = other DNA
ttcgacacacaggttctcca

SEQ ID NO: 2586 - DNA, 20 bp, synthetic construct
  misc_feature 1..20: note = Synthetic Sequence
  source 1..20: mol_type = other DNA
ctaatgtgagtgatgtaaaa

SEQ ID NO: 2587 - DNA, 20 bp, synthetic construct
  misc_feature 1..20: note = Synthetic Sequence
  source 1..20: mol_type = other DNA
gttgggagagaagctgaggc

SEQ ID NO: 2588 - DNA, 20 bp, synthetic construct
  misc_feature 1..20: note = Synthetic Sequence
  source 1..20: mol_type = other DNA
gtgccactgcaatccggcct

SEQ ID NO: 2589 - DNA, 20 bp, synthetic construct
  misc_feature 1..20: note = Synthetic Sequence
  source 1..20: mol_type = other DNA
ggaaggggaacgtcacactc

SEQ ID NO: 2590 - DNA, 20 bp, synthetic construct
  misc_feature 1..20: note = Synthetic Sequence
  source 1..20: mol_type = other DNA
tttattagggactttcaaaa

SEQ ID NO: 2591 - DNA, 20 bp, synthetic construct
  misc_feature 1..20: note = Synthetic Sequence
  source 1..20: mol_type = other DNA
tctactgttgatgggcattt

SEQ ID NO: 2592 - DNA, 20 bp, synthetic construct
  misc_feature 1..20: note = Synthetic Sequence
  source 1..20: mol_type = other DNA
aaggggaacgtcacactctg

SEQ ID NO: 2593 - DNA, 20 bp, synthetic construct
  misc_feature 1..20: note = Synthetic Sequence
  source 1..20: mol_type = other DNA
taggagaatcacttgaatcc

SEQ ID NO: 2594 - DNA, 20 bp, synthetic construct
  misc_feature 1..20: note = Synthetic Sequence
  source 1..20: mol_type = other DNA
aactgagggaactcagagac

SEQ ID NO: 2595 - DNA, 20 bp, synthetic construct
  misc_feature 1..20: note = Synthetic Sequence
  source 1..20: mol_type = other DNA
aacatgcaggtttgatacat

SEQ ID NO: 2596 - DNA, 20 bp, synthetic construct
  misc_feature 1..20: note = Synthetic Sequence
  source 1..20: mol_type = other DNA
ctcaacagatgttctgtgag

SEQ ID NO: 2597 - DNA, 20 bp, synthetic construct
  misc_feature 1..20: note = Synthetic Sequence
  source 1..20: mol_type = other DNA
gcagaaaaatcacttgaacc

SEQ ID NO: 2598 - DNA, 20 bp, synthetic construct
  misc_feature 1..20: note = Synthetic Sequence
  source 1..20: mol_type = other DNA
tcaataaattaggtattgac

SEQ ID NO: 2599 - DNA, 20 bp, synthetic construct
  misc_feature 1..20: note = Synthetic Sequence
  source 1..20: mol_type = other DNA
aggcagaagttggaacagtt

SEQ ID NO: 2600 - DNA, 20 bp, synthetic construct
  misc_feature 1..20: note = Synthetic Sequence
  source 1..20: mol_type = other DNA
tccagctttacttgtcatag

SEQ ID NO: 2601 - DNA, 20 bp, synthetic construct
  misc_feature 1..20: note = Synthetic Sequence
  source 1..20: mol_type = other DNA
agctgcacagctagagaaac

SEQ ID NO: 2602 - DNA, 20 bp, synthetic construct
  misc_feature 1..20: note = Synthetic Sequence
  source 1..20: mol_type = other DNA
tagggactttcaaaagggga

SEQ ID NO: 2603 - DNA, 20 bp, synthetic construct
  misc_feature 1..20: note = Synthetic Sequence
  source 1..20: mol_type = other DNA
aaagggaggggacccaaagg

SEQ ID NO: 2604 - DNA, 20 bp, synthetic construct
  misc_feature 1..20: note = Synthetic Sequence
  source 1..20: mol_type = other DNA
gtatagggtcaggtgctgaa

SEQ ID NO: 2605 - DNA, 20 bp, synthetic construct
  misc_feature 1..20: note = Synthetic Sequence
  source 1..20: mol_type = other DNA
caagacaagggggcagggta

SEQ ID NO: 2606 - DNA, 20 bp, synthetic construct
  misc_feature 1..20: note = Synthetic Sequence
  source 1..20: mol_type = other DNA
aagaatcatttgaacccggg

SEQ ID NO: 2607 - DNA, 20 bp, synthetic construct
  misc_feature 1..20: note = Synthetic Sequence
  source 1..20: mol_type = other DNA
accagccccactttgtcttt

SEQ ID NO: 2608 - DNA, 20 bp, synthetic construct
  misc_feature 1..20: note = Synthetic Sequence
  source 1..20: mol_type = other DNA
tgggggagccagaagggaga

SEQ ID NO: 2609 - DNA, 20 bp, synthetic construct
  misc_feature 1..20: note = Synthetic Sequence
  source 1..20: mol_type = other DNA
agtcaaagacaggtttattt

SEQ ID NO: 2610 - DNA, 20 bp, synthetic construct
  misc_feature 1..20: note = Synthetic Sequence
  source 1..20: mol_type = other DNA
cagacactggggtctacttg

SEQ ID NO: 2611 - DNA, 20 bp, synthetic construct
  misc_feature 1..20: note = Synthetic Sequence
  source 1..20: mol_type = other DNA
acaaagggaggggacccaaa

SEQ ID NO: 2612 - DNA, 20 bp, synthetic construct
  misc_feature 1..20: note = Synthetic Sequence
  source 1..20: mol_type = other DNA
ttggagaataaacctgagag

SEQ ID NO: 2613 - DNA, 20 bp, synthetic construct
  misc_feature 1..20: note = Synthetic Sequence
  source 1..20: mol_type = other DNA
cacaagaatcatttgaaccc

SEQ ID NO: 2614 - DNA, 20 bp, synthetic construct
  misc_feature 1..20: note = Synthetic Sequence
  source 1..20: mol_type = other DNA
attccaataaatagaaaaag

SEQ ID NO: 2615 - DNA, 20 bp, synthetic construct
  misc_feature 1..20: note = Synthetic Sequence
  source 1..20: mol_type = other DNA
tcctaaagacaaagtggggc

SEQ ID NO: 2616 - DNA, 20 bp, synthetic construct
  misc_feature 1..20: note = Synthetic Sequence
  source 1..20: mol_type = other DNA
gggtactatgctcactacct

SEQ ID NO: 2617 - DNA, 20 bp, synthetic construct
  misc_feature 1..20: note = Synthetic Sequence
  source 1..20: mol_type = other DNA
tttaaataaggaagaggaac

SEQ ID NO: 2618 - DNA, 20 bp, synthetic construct
  misc_feature 1..20: note = Synthetic Sequence
  source 1..20: mol_type = other DNA
catatgtagaaagctgaaaa

SEQ ID NO: 2619 - DNA, 20 bp, synthetic construct
  misc_feature 1..20: note = Synthetic Sequence
  source 1..20: mol_type = other DNA
ggcctcacagtcatggcaga

SEQ ID NO: 2620 - DNA, 20 bp, synthetic construct
  misc_feature 1..20: note = Synthetic Sequence
  source 1..20: mol_type = other DNA
attggactcacagttccaca

SEQ ID NO: 2621 - DNA, 20 bp, synthetic construct
  misc_feature 1..20: note = Synthetic Sequence
  source 1..20: mol_type = other DNA
acttgtaatcccagcacttc

SEQ ID NO: 2622 - DNA, 20 bp, synthetic construct
  misc_feature 1..20: note = Synthetic Sequence
  source 1..20: mol_type = other DNA
caagcagggggtacatgact

SEQ ID NO: 2623 - DNA, 20 bp, synthetic construct
  misc_feature 1..20: note = Synthetic Sequence
  source 1..20: mol_type = other DNA
ccagcagtggcaacccgctt

SEQ ID NO: 2624 - DNA, 20 bp, synthetic construct
  misc_feature 1..20: note = Synthetic Sequence
  source 1..20: mol_type = other DNA
gtcagaaatacacaggacac

SEQ ID NO: 2625 - DNA, 20 bp, synthetic construct
  misc_feature 1..20: note = Synthetic Sequence
  source 1..20: mol_type = other DNA
caggaaaatggtgtgaacct

SEQ ID NO: 2626 - DNA, 20 bp, synthetic construct
  misc_feature 1..20: note = Synthetic Sequence
  source 1..20: mol_type = other DNA
tgggtatacatgtgccatgg

SEQ ID NO: 2627 - DNA, 20 bp, synthetic construct
  misc_feature 1..20: note = Synthetic Sequence
  source 1..20: mol_type = other DNA
tggaccaatcagtaggatgt

SEQ ID NO: 2628 - DNA, 20 bp, synthetic construct
  misc_feature 1..20: note = Synthetic Sequence
  source 1..20: mol_type = other DNA
accactatgacaagtaaagc

SEQ ID NO: 2629 - DNA, 20 bp, synthetic construct
  misc_feature 1..20: note = Synthetic Sequence
  source 1..20: mol_type = other DNA
gctgcacagctagagaaaca

SEQ ID NO: 2630 - DNA, 20 bp, synthetic construct
  misc_feature 1..20: note = Synthetic Sequence
  source 1..20: mol_type = other DNA
acagaacatctgttgagact

SEQ ID NO: 2631 - DNA, 20 bp, synthetic construct
  misc_feature 1..20: note = Synthetic Sequence
  source 1..20: mol_type = other DNA
tgcttgaacccgggtggcag

SEQ ID NO: 2632 - DNA, 20 bp, synthetic construct
  misc_feature 1..20: note = Synthetic Sequence
  source 1..20: mol_type = other DNA
aagtagctgggcgtggtggt

SEQ ID NO: 2633 - DNA, 20 bp, synthetic construct
  misc_feature 1..20: note = Synthetic Sequence
  source 1..20: mol_type = other DNA
ccaagttggcaccagagtgg

SEQ ID NO: 2634 - DNA, 20 bp, synthetic construct
  misc_feature 1..20: note = Synthetic Sequence
  source 1..20: mol_type = other DNA
ggcttcaatgtcaccttaac

SEQ ID NO: 2635 - DNA, 20 bp, synthetic construct
  misc_feature 1..20: note = Synthetic Sequence
  source 1..20: mol_type = other DNA
cgccacactgacttccacga

SEQ ID NO: 2636 - DNA, 20 bp, synthetic construct
  misc_feature 1..20: note = Synthetic Sequence
  source 1..20: mol_type = other DNA
tgtgccactgcaatccggcc

SEQ ID NO: 2637 - DNA, 20 bp, synthetic construct
  misc_feature 1..20: note = Synthetic Sequence
  source 1..20: mol_type = other DNA
gagatgggatttcaccatgc

SEQ ID NO: 2638 - DNA, 20 bp, synthetic construct
  misc_feature 1..20: note = Synthetic Sequence
  source 1..20: mol_type = other DNA
ttagggactttcaaaagggg

SEQ ID NO: 2639 - DNA, 20 bp, synthetic construct
  misc_feature 1..20: note = Synthetic Sequence
  source 1..20: mol_type = other DNA
gcatgagaatcccttgaacc

SEQ ID NO: 2640 - DNA, 20 bp, synthetic construct
  misc_feature 1..20: note = Synthetic Sequence
  source 1..20: mol_type = other DNA
agcagggggtacatgactgg

SEQ ID NO: 2641 - DNA, 20 bp, synthetic construct
  misc_feature 1..20: note = Synthetic Sequence
  source 1..20: mol_type = other DNA
tcaggagttccaggccagcc

SEQ ID NO: 2642 - DNA, 20 bp, synthetic construct
  misc_feature 1..20: note = Synthetic Sequence
  source 1..20: mol_type = other DNA
cccaagcgggttgccactgc

SEQ ID NO: 2643 - DNA, 20 bp, synthetic construct
  misc_feature 1..20: note = Synthetic Sequence
  source 1..20: mol_type = other DNA
gggtgacatcacatatcagt

SEQ ID NO: 2644 - DNA, 20 bp, synthetic construct
  misc_feature 1..20: note = Synthetic Sequence
  source 1..20: mol_type = other DNA
ttgggagagaagctgaggca

SEQ ID NO: 2645 - DNA, 20 bp, synthetic construct
  misc_feature 1..20: note = Synthetic Sequence
  source 1..20: mol_type = other DNA
atgagttcatgtcatttgca

SEQ ID NO: 2646 - DNA, 20 bp, synthetic construct
  misc_feature 1..20: note = Synthetic Sequence
  source 1..20: mol_type = other DNA
aaatacacaggacacaggtc

SEQ ID NO: 2647 - DNA, 20 bp, synthetic construct
  misc_feature 1..20: note = Synthetic Sequence
  source 1..20: mol_type = other DNA
ggtgattgaattatgggggc

SEQ ID NO: 2648 - DNA, 20 bp, synthetic construct
  misc_feature 1..20: note = Synthetic Sequence
  source 1..20: mol_type = other DNA
gcttcgagtgggattagggg

SEQ ID NO: 2649 - DNA, 20 bp, synthetic construct
  misc_feature 1..20: note = Synthetic Sequence
  source 1..20: mol_type = other DNA
ctggccagggtctctgagag

SEQ ID NO: 2650 - DNA, 20 bp, synthetic construct
  misc_feature 1..20: note = Synthetic Sequence
  source 1..20: mol_type = other DNA
cgaggcaggcagatcacccg

SEQ ID NO: 2651 - DNA, 20 bp, synthetic construct
  misc_feature 1..20: note = Synthetic Sequence
  source 1..20: mol_type = other DNA
gggcttaatacctgggtgat

SEQ ID NO: 2652 - DNA, 20 bp, synthetic construct
  misc_feature 1..20: note = Synthetic Sequence
  source 1..20: mol_type = other DNA
tgggcaaccagcagccctcg

SEQ ID NO: 2653 - DNA, 20 bp, synthetic construct
  misc_feature 1..20: note = Synthetic Sequence
  source 1..20: mol_type = other DNA
tcataatcaataaaaactga

SEQ ID NO: 2654 - DNA, 20 bp, synthetic construct
  misc_feature 1..20: note = Synthetic Sequence
  source 1..20: mol_type = other DNA
aagcagggggtacatgactg

SEQ ID NO: 2655 - DNA, 20 bp, synthetic construct
  misc_feature 1..20: note = Synthetic Sequence
  source 1..20: mol_type = other DNA
agagccactctcagagaccc

SEQ ID NO: 2656 - DNA, 20 bp, synthetic construct
  misc_feature 1..20: note = Synthetic Sequence
  source 1..20: mol_type = other DNA
tttcctacaactagcatata

SEQ ID NO: 2657 - DNA, 20 bp, synthetic construct
  misc_feature 1..20: note = Synthetic Sequence
  source 1..20: mol_type = other DNA
gccactcgggaggctgagac

SEQ ID NO: 2658 - DNA, 20 bp, synthetic construct
  misc_feature 1..20: note = Synthetic Sequence
  source 1..20: mol_type = other DNA
tcctacaactagcatataag

SEQ ID NO: 2659 - DNA, 20 bp, synthetic construct
  misc_feature 1..20: note = Synthetic Sequence
  source 1..20: mol_type = other DNA
atcataatcaataaaaactg

SEQ ID NO: 2660 - DNA, 20 bp, synthetic construct
  misc_feature 1..20: note = Synthetic Sequence
  source 1..20: mol_type = other DNA
aaacttagaatcatggcaga

SEQ ID NO: 2661 - DNA, 20 bp, synthetic construct
  misc_feature 1..20: note = Synthetic Sequence
  source 1..20: mol_type = other DNA
ctaaaaactcttaataaatt

SEQ ID NO: 2662 - DNA, 20 bp, synthetic construct
  misc_feature 1..20: note = Synthetic Sequence
  source 1..20: mol_type = other DNA
cacatgccttgggagctaag

SEQ ID NO: 2663 - DNA, 20 bp, synthetic construct
  misc_feature 1..20: note = Synthetic Sequence
  source 1..20: mol_type = other DNA
tggaggtggggtctggtggg

SEQ ID NO: 2664 - DNA, 20 bp, synthetic construct
  misc_feature 1..20: note = Synthetic Sequence
  source 1..20: mol_type = other DNA
atggaccaatcagtaggatg

SEQ ID NO: 2665 - DNA, 20 bp, synthetic construct
  misc_feature 1..20: note = Synthetic Sequence
  source 1..20: mol_type = other DNA
ttcctacaactagcatataa

SEQ ID NO: 2666 - DNA, 20 bp, synthetic construct
  misc_feature 1..20: note = Synthetic Sequence
  source 1..20: mol_type = other DNA
cctaactctcctcctggcca

SEQ ID NO: 2667 - DNA, 20 bp, synthetic construct
  misc_feature 1..20: note = Synthetic Sequence
  source 1..20: mol_type = other DNA
ggagagttaggttccagtgt

SEQ ID NO: 2668 - DNA, 20 bp, synthetic construct
  misc_feature 1..20: note = Synthetic Sequence
  source 1..20: mol_type = other DNA
cactcgaacccgggaggcag

SEQ ID NO: 2669 - DNA, 20 bp, synthetic construct
  misc_feature 1..20: note = Synthetic Sequence
  source 1..20: mol_type = other DNA
agctactaggaggctgaggc

SEQ ID NO: 2670 - DNA, 20 bp, synthetic construct
  misc_feature 1..20: note = Synthetic Sequence
  source 1..20: mol_type = other DNA
acaggcatgcgccaccaccc

SEQ ID NO: 2671 - DNA, 20 bp, synthetic construct
  misc_feature 1..20: note = Synthetic Sequence
  source 1..20: mol_type = other DNA
tagtgagcatagtacccaat

SEQ ID NO: 2672 - DNA, 20 bp, synthetic construct
  misc_feature 1..20: note = Synthetic Sequence
  source 1..20: mol_type = other DNA
cagcaaccacttagctccca

SEQ ID NO: 2673 - DNA, 20 bp, synthetic construct
  misc_feature 1..20: note = Synthetic Sequence
  source 1..20: mol_type = other DNA
caagagaattgtttgaaccc

SEQ ID NO: 2674 - DNA, 20 bp, synthetic construct
  misc_feature 1..20: note = Synthetic Sequence
  source 1..20: mol_type = other DNA
cctacacccaggaatgaaca

SEQ ID NO: 2675 - DNA, 20 bp, synthetic construct
  misc_feature 1..20: note = Synthetic Sequence
  source 1..20: mol_type = other DNA
ctggaacctaactctcctcc

SEQ ID NO: 2676 - DNA, 20 bp, synthetic construct
  misc_feature 1..20: note = Synthetic Sequence
  source 1..20: mol_type = other DNA
caaaagccaaaacagacaaa

SEQ ID NO: 2677 - DNA, 20 bp, synthetic construct
  misc_feature 1..20: note = Synthetic Sequence
  source 1..20: mol_type = other DNA
ctgtcagggggtggggggca

SEQ ID NO: 2678 - DNA, 20 bp, synthetic construct
  misc_feature 1..20: note = Synthetic Sequence
  source 1..20: mol_type = other DNA
gccaaggcaggcagatcact

SEQ ID NO: 2679 - DNA, 20 bp, synthetic construct
  misc_feature 1..20: note = Synthetic Sequence
  source 1..20: mol_type = other DNA
aaaagccaaaacagacaaat

SEQ ID NO: 2680 - DNA, 20 bp, synthetic construct
  misc_feature 1..20: note = Synthetic Sequence
  source 1..20: mol_type = other DNA
ttaactcgtcacttagcatt

SEQ ID NO: 2681 - DNA, 20 bp, synthetic construct
  misc_feature 1..20: note = Synthetic Sequence
  source 1..20: mol_type = other DNA
aaaaataactaatgagtact

SEQ ID NO: 2682 - DNA, 20 bp, synthetic construct
  misc_feature 1..20: note = Synthetic Sequence
  source 1..20: mol_type = other DNA
gagaattgtgtgaacccagg

SEQ ID NO: 2683 - DNA, 20 bp, synthetic construct
  misc_feature 1..20: note = Synthetic Sequence
  source 1..20: mol_type = other DNA
tctcagagaccctggccagg

SEQ ID NO: 2684 - DNA, 20 bp, synthetic construct
  misc_feature 1..20: note = Synthetic Sequence
  source 1..20: mol_type = other DNA
aaacacatctgaacatcaga

SEQ ID NO: 2685 - DNA, 20 bp, synthetic construct
  misc_feature 1..20: note = Synthetic Sequence
  source 1..20: mol_type = other DNA
cctacaactagcatataagg

SEQ ID NO: 2686 - DNA, 20 bp, synthetic construct
  misc_feature 1..20: note = Synthetic Sequence
  source 1..20: mol_type = other DNA
gatacagagtttcgacacac

SEQ ID NO: 2687 - DNA, 20 bp, synthetic construct
  misc_feature 1..20: note = Synthetic Sequence
  source 1..20: mol_type = other DNA
ccagagaatcgcttgaacct

SEQ ID NO: 2688 - DNA, 20 bp, synthetic construct
  misc_feature 1..20: note = Synthetic Sequence
  source 1..20: mol_type = other DNA
taatgtaaatgacgagttac

SEQ ID NO: 2689 - DNA, 20 bp, synthetic construct
  misc_feature 1..20: note = Synthetic Sequence
  source 1..20: mol_type = other DNA
ccaacccaaatgtccatcaa

SEQ ID NO: 2690 - DNA, 20 bp, synthetic construct
  misc_feature 1..20: note = Synthetic Sequence
  source 1..20: mol_type = other DNA
tgttgagactaggagatgcc

SEQ ID NO: 2691 - DNA, 20 bp, synthetic construct
  misc_feature 1..20: note = Synthetic Sequence
  source 1..20: mol_type = other DNA
gtgtggaaggggacccaagc

SEQ ID NO: 2692 - DNA, 20 bp, synthetic construct
  misc_feature 1..20: note = Synthetic Sequence
  source 1..20: mol_type = other DNA
cagtagccaattcaatcaac

SEQ ID NO: 2693 - DNA, 20 bp, synthetic construct
  misc_feature 1..20: note = Synthetic Sequence
  source 1..20: mol_type = other DNA
aagtaggcaaaaaagttaaa

SEQ ID NO: 2694 - DNA, 20 bp, synthetic construct
  misc_feature 1..20: note = Synthetic Sequence
  source 1..20: mol_type = other DNA
ctgaccttaatgccaggaac

SEQ ID NO: 2695 - DNA, 20 bp, synthetic construct
  misc_feature 1..20: note = Synthetic Sequence
  source 1..20: mol_type = other DNA
cacctcacccaggaagcaca

SEQ ID NO: 2696 - DNA, 20 bp, synthetic construct
  misc_feature 1..20: note = Synthetic Sequence
  source 1..20: mol_type = other DNA
ccaggaactggagtgcttga

SEQ ID NO: 2697 - DNA, 20 bp, synthetic construct
  misc_feature 1..20: note = Synthetic Sequence
  source 1..20: mol_type = other DNA
cgagacccgcctggccaaca

SEQ ID NO: 2698 - DNA, 20 bp, synthetic construct
  misc_feature 1..20: note = Synthetic Sequence
  source 1..20: mol_type = other DNA
gcacacctgaccttaatgcc

SEQ ID NO: 2699 - DNA, 20 bp, synthetic construct
  misc_feature 1..20: note = Synthetic Sequence
  source 1..20: mol_type = other DNA
caaagtggggctggtgagat

SEQ ID NO: 2700 - DNA, 20 bp, synthetic construct
  misc_feature 1..20: note = Synthetic Sequence
  source 1..20: mol_type = other DNA
acctaactctcctcctggcc

SEQ ID NO: 2701 - DNA, 20 bp, synthetic construct
  misc_feature 1..20: note = Synthetic Sequence
  source 1..20: mol_type = other DNA
agatatcacaaggtaaatgg

SEQ ID NO: 2702 - DNA, 20 bp, synthetic construct
  misc_feature 1..20: note = Synthetic Sequence
  source 1..20: mol_type = other DNA
taaaatatcacaaggcaaat

SEQ ID NO: 2703 - DNA, 20 bp, synthetic construct
  misc_feature 1..20: note = Synthetic Sequence
  source 1..20: mol_type = other DNA
ttgagcacctactatgtgcc

SEQ ID NO: 2704 - DNA, 20 bp, synthetic construct
  misc_feature 1..20: note = Synthetic Sequence
  source 1..20: mol_type = other DNA
cgaggcaggtggatcagttg

SEQ ID NO: 2705 - DNA, 20 bp, synthetic construct
  misc_feature 1..20: note = Synthetic Sequence
  source 1..20: mol_type = other DNA
agtctatcattgttggacat

SEQ ID NO: 2706 - DNA, 20 bp, synthetic construct
  misc_feature 1..20: note = Synthetic Sequence
  source 1..20: mol_type = other DNA
ccattgatggacatttgggt

SEQ ID NO: 2707 - DNA, 20 bp, synthetic construct
  misc_feature 1..20: note = Synthetic Sequence
  source 1..20: mol_type = other DNA
caggataatggtgtgaaccc

SEQ ID NO: 2708 - DNA, 20 bp, synthetic construct
  misc_feature 1..20: note = Synthetic Sequence
  source 1..20: mol_type = other DNA
agacactggggtctacttga

SEQ ID NO: 2709 - DNA, 20 bp, synthetic construct
  misc_feature 1..20: note = Synthetic Sequence
  source 1..20: mol_type = other DNA
aagaatcacttaaacccggg

SEQ ID NO: 2710 - DNA, 20 bp, synthetic construct
  misc_feature 1..20: note = Synthetic Sequence
  source 1..20: mol_type = other DNA
tgtgagtcacctccaatgat

SEQ ID NO: 2711 - DNA, 20 bp, synthetic construct
  misc_feature 1..20: note = Synthetic Sequence
  source 1..20: mol_type = other DNA
ccttcaagcactccagttcc

SEQ ID NO: 2712 - DNA, 20 bp, synthetic construct
  misc_feature 1..20: note = Synthetic Sequence
  source 1..20: mol_type = other DNA
cacatgatttacagctgtga

SEQ ID NO: 2713 - DNA, 20 bp, synthetic construct
  misc_feature 1..20: note = Synthetic Sequence
  source 1..20: mol_type = other DNA
accccatcaaaagtgggcaa

SEQ ID NO: 2714 - DNA, 20 bp, synthetic construct
  misc_feature 1..20: note = Synthetic Sequence
  source 1..20: mol_type = other DNA
cacatggctggagaggcctc

SEQ ID NO: 2715 - DNA, 20 bp, synthetic construct
  misc_feature 1..20: note = Synthetic Sequence
  source 1..20: mol_type = other DNA
aatgctaagtgacgagttaa

SEQ ID NO: 2716 - DNA, 20 bp, synthetic construct
  misc_feature 1..20: note = Synthetic Sequence
  source 1..20: mol_type = other DNA
ctccaccagcttcttgtggg

SEQ ID NO: 2717 - DNA, 20 bp, synthetic construct
  misc_feature 1..20: note = Synthetic Sequence
  source 1..20: mol_type = other DNA
gcacaagaatcatttgaacc

SEQ ID NO: 2718 - DNA, 20 bp, synthetic construct
  misc_feature 1..20: note = Synthetic Sequence
  source 1..20: mol_type = other DNA
atgctaagtgacgagttaat

SEQ ID NO: 2719 - DNA, 20 bp, synthetic construct
  misc_feature 1..20: note = Synthetic Sequence
  source 1..20: mol_type = other DNA
ttgatctgtccccaggtggg

SEQ ID NO: 2720 - DNA, 20 bp, synthetic construct
  misc_feature 1..20: note = Synthetic Sequence
  source 1..20: mol_type = other DNA
aggggagggaacttagagga

SEQ ID NO: 2721 - DNA, 20 bp, synthetic construct
  misc_feature 1..20: note = Synthetic Sequence
  source 1..20: mol_type = other DNA
ctcaaaactggcagcctttc

SEQ ID NO: 2722 - DNA, 20 bp, synthetic construct
  misc_feature 1..20: note = Synthetic Sequence
  source 1..20: mol_type = other DNA
gcaagagaatcgtttgaacc

SEQ ID NO: 2723 - DNA, 20 bp, synthetic construct
  misc_feature 1..20: note = Synthetic Sequence
  source 1..20: mol_type = other DNA
ataaacctgagaggggcttc

SEQ ID NO: 2724 - DNA, 20 bp, synthetic construct
  misc_feature 1..20: note = Synthetic Sequence
  source 1..20: mol_type = other DNA
aaacacttgaacccaggagg

SEQ ID NO: 2725 - DNA, 20 bp, synthetic construct
  misc_feature 1..20: note = Synthetic Sequence
  source 1..20: mol_type = other DNA
tgcctgagagcacagcagga

SEQ ID NO: 2726 - DNA, 20 bp, synthetic construct
  misc_feature 1..20: note = Synthetic Sequence
  source 1..20: mol_type = other DNA
aattcaatcaactggaagaa

SEQ ID NO: 2727 - DNA, 20 bp, synthetic construct
  misc_feature 1..20: note = Synthetic Sequence
  source 1..20: mol_type = other DNA
cagggacgcctggagccccc

SEQ ID NO: 2728 - DNA, 20 bp, synthetic construct
  misc_feature 1..20: note = Synthetic Sequence
  source 1..20: mol_type = other DNA
tttggaactgggtaacaggc

SEQ ID NO: 2729 - DNA, 20 bp, synthetic construct
  misc_feature 1..20: note = Synthetic Sequence
  source 1..20: mol_type = other DNA
ataagatatcacaaggtaaa

SEQ ID NO: 2730 - DNA, 20 bp, synthetic construct
  misc_feature 1..20: note = Synthetic Sequence
  source 1..20: mol_type = other DNA
ctgatatgtgatgtcacccc

SEQ ID NO: 2731 - DNA, 20 bp, synthetic construct
  misc_feature 1..20: note = Synthetic Sequence
  source 1..20: mol_type = other DNA
acccttaataaaaaacttgc

SEQ ID NO: 2732 - DNA, 20 bp, synthetic construct
  misc_feature 1..20: note = Synthetic Sequence
  source 1..20: mol_type = other DNA
aatgtaaatgacgagttact

SEQ ID NO: 2733 - DNA, 20 bp, synthetic construct
  misc_feature 1..20: note = Synthetic Sequence
  source 1..20: mol_type = other DNA
aagccagtgcccttatacaa

SEQ ID NO: 2734 - DNA, 20 bp, synthetic construct
  misc_feature 1..20: note = Synthetic Sequence
  source 1..20: mol_type = other DNA
ttattcacttgggtgcaagt

SEQ ID NO: 2735 - DNA, 20 bp, synthetic construct
  misc_feature 1..20: note = Synthetic Sequence
  source 1..20: mol_type = other DNA
caggaatttgtggccagcct

SEQ ID NO: 2736 - DNA, 20 bp, synthetic construct
  misc_feature 1..20: note = Synthetic Sequence
  source 1..20: mol_type = other DNA
tggaaggcaaaggggaagca

SEQ ID NO: 2737 - DNA, 20 bp, synthetic construct
  misc_feature 1..20: note = Synthetic Sequence
  source 1..20: mol_type = other DNA
aaggggaaggtagccaagga

SEQ ID NO: 2738 - DNA, 20 bp, synthetic construct
  misc_feature 1..20: note = Synthetic Sequence
  source 1..20: mol_type = other DNA
agtaactcgtcatttacatt

SEQ ID NO: 2739 - DNA, 20 bp, synthetic construct
  misc_feature 1..20: note = Synthetic Sequence
  source 1..20: mol_type = other DNA
caacagtgggcccaggggac

SEQ ID NO: 2740 - DNA, 20 bp, synthetic construct
  misc_feature 1..20: note = Synthetic Sequence
  source 1..20: mol_type = other DNA
tcacaccattctcctgcctc

SEQ ID NO: 2741 - DNA, 20 bp, synthetic construct
  misc_feature 1..20: note = Synthetic Sequence
  source 1..20: mol_type = other DNA
ttggaactgggtaacaggca

SEQ ID NO: 2742 - DNA, 20 bp, synthetic construct
  misc_feature 1..20: note = Synthetic Sequence
  source 1..20: mol_type = other DNA
gtcacctccaatgataggta

SEQ ID NO: 2743 - DNA, 20 bp, synthetic construct
  misc_feature 1..20: note = Synthetic Sequence
  source 1..20: mol_type = other DNA
acagagatttgaattctccc

SEQ ID NO: 2744 - DNA, 20 bp, synthetic construct
  misc_feature 1..20: note = Synthetic Sequence
  source 1..20: mol_type = other DNA
atcacatggttgtagatgtg

SEQ ID NO: 2745 - DNA, 20 bp, synthetic construct
  misc_feature 1..20: note = Synthetic Sequence
  source 1..20: mol_type = other DNA
acagagaattgcttgaaccc

SEQ ID NO: 2746 - DNA, 20 bp, synthetic construct
  misc_feature 1..20: note = Synthetic Sequence
  source 1..20: mol_type = other DNA
atacagcaatgaagaattac

SEQ ID NO: 2747 - DNA, 20 bp, synthetic construct
  misc_feature 1..20: note = Synthetic Sequence
  source 1..20: mol_type = other DNA
gttgaagaggctgaaatgag

SEQ ID NO: 2748 - DNA, 20 bp, synthetic construct
  misc_feature 1..20: note = Synthetic Sequence
  source 1..20: mol_type = other DNA
acctcacccaggaagcacaa

SEQ ID NO: 2749 - DNA, 20 bp, synthetic construct
  misc_feature 1..20: note = Synthetic Sequence
  source 1..20: mol_type = other DNA
tctctaccatctcggagagg

SEQ ID NO: 2750 - DNA, 20 bp, synthetic construct
  misc_feature 1..20: note = Synthetic Sequence
  source 1..20: mol_type = other DNA
agtgggattaggggcggcgt

SEQ ID NO: 2751 - DNA, 20 bp, synthetic construct
  misc_feature 1..20: note = Synthetic Sequence
  source 1..20: mol_type = other DNA
tccttgaacccaggaggtgg

SEQ ID NO: 2752 - DNA, 20 bp, synthetic construct
  misc_feature 1..20: note = Synthetic Sequence
  source 1..20: mol_type = other DNA
caggaaatttacaatcatgg

SEQ ID NO: 2753 - DNA, 20 bp, synthetic construct
  misc_feature 1..20: note = Synthetic Sequence
  source 1..20: mol_type = other DNA
gaagaacataaatgatctga

SEQ ID NO: 2754 - DNA, 20 bp, synthetic construct
  misc_feature 1..20: note = Synthetic Sequence
  source 1..20: mol_type = other DNA
gcaggaaaatcatttgaacc

SEQ ID NO: 2755 - DNA, 20 bp, synthetic construct
  misc_feature 1..20: note = Synthetic Sequence
  source 1..20: mol_type = other DNA
gggaactcagagaccggtgc

SEQ ID NO: 2756 - DNA, 20 bp, synthetic construct
  misc_feature 1..20: note = Synthetic Sequence
  source 1..20: mol_type = other DNA
ggggagggaacttagaggac

SEQ ID NO: 2757 - DNA, 20 bp, synthetic construct
  misc_feature 1..20: note = Synthetic Sequence
  source 1..20: mol_type = other DNA
ctcttgaacctgagaggcag

SEQ ID NO: 2758 - DNA, 20 bp, synthetic construct
  misc_feature 1..20: note = Synthetic Sequence
  source 1..20: mol_type = other DNA
tatcagtgcagcctggcatt

SEQ ID NO: 2759 - DNA, 20 bp, synthetic construct
  misc_feature 1..20: note = Synthetic Sequence
  source 1..20: mol_type = other DNA
cactgcaacctctgcttcca

SEQ ID NO: 2760 - DNA, 20 bp, synthetic construct
  misc_feature 1..20: note = Synthetic Sequence
  source 1..20: mol_type = other DNA
cctgtgacacagccctcagg

SEQ ID NO: 2761 - DNA, 20 bp, synthetic construct
  misc_feature 1..20: note = Synthetic Sequence
  source 1..20: mol_type = other DNA
aattagccgggaatggtggc

SEQ ID NO: 2762 - DNA, 20 bp, synthetic construct
  misc_feature 1..20: note = Synthetic Sequence
  source 1..20: mol_type = other DNA
caggtcaggcaacagtcacc

SEQ ID NO: 2763 - DNA, 20 bp, synthetic construct
  misc_feature 1..20: note = Synthetic Sequence
  source 1..20: mol_type = other DNA
ccaaggacctgcaccggcac

SEQ ID NO: 2764 - DNA, 20 bp, synthetic construct
  misc_feature 1..20: note = Synthetic Sequence
  source 1..20: mol_type = other DNA
tagtggaaaattacagttaa

SEQ ID NO: 2765 - DNA, 20 bp, synthetic construct
  misc_feature 1..20: note = Synthetic Sequence
  source 1..20: mol_type = other DNA
gaggaagagacagacaaaga

SEQ ID NO: 2766 - DNA, 20 bp, synthetic construct
  misc_feature 1..20: note = Synthetic Sequence
  source 1..20: mol_type = other DNA
gcataaaacccctcgtggct

SEQ ID NO: 2767 - DNA, 20 bp, synthetic construct
  misc_feature 1..20: note = Synthetic Sequence
  source 1..20: mol_type = other DNA
ttacaggaccaaattaagaa

SEQ ID NO: 2768 - DNA, 20 bp, synthetic construct
  misc_feature 1..20: note = Synthetic Sequence
  source 1..20: mol_type = other DNA
ttgtaatttgtacttccctc

SEQ ID NO: 2769 - DNA, 20 bp, synthetic construct
  misc_feature 1..20: note = Synthetic Sequence
  source 1..20: mol_type = other DNA
tgttataattgtggtcaaat

SEQ ID NO: 2770 - DNA, 20 bp, synthetic construct
  misc_feature 1..20: note = Synthetic Sequence
  source 1..20: mol_type = other DNA
aaaacaaccccatcaaaagt

SEQ ID NO: 2771 - DNA, 20 bp, synthetic construct
  misc_feature 1..20: note = Synthetic Sequence
  source 1..20: mol_type = other DNA
ctgtcatgagaacagcatgg

SEQ ID NO: 2772 - DNA, 20 bp, synthetic construct
  misc_feature 1..20: note = Synthetic Sequence
  source 1..20: mol_type = other DNA
atgaagacatacccaagact

SEQ ID NO: 2773 - DNA, 20 bp, synthetic construct
  misc_feature 1..20: note = Synthetic Sequence
  source 1..20: mol_type = other DNA
gcctcacaatcatggcagaa

SEQ ID NO: 2774 - DNA, 20 bp, synthetic construct
  misc_feature 1..20: note = Synthetic Sequence
  source 1..20: mol_type = other DNA
cactccagttcctggcatta

SEQ ID NO: 2775 - DNA, 20 bp, synthetic construct
  misc_feature 1..20: note = Synthetic Sequence
  source 1..20: mol_type = other DNA
cagacccaacaccaggtcat

SEQ ID NO: 2776 - DNA, 20 bp, synthetic construct
  misc_feature 1..20: note = Synthetic Sequence
  source 1..20: mol_type = other DNA
aatagtgtgaacccaggagg

SEQ ID NO: 2777 - DNA, 20 bp, synthetic construct
  misc_feature 1..20: note = Synthetic Sequence
  source 1..20: mol_type = other DNA
aaattagctgggtgtggttg

SEQ ID NO: 2778 - DNA, 20 bp, synthetic construct
  misc_feature 1..20: note = Synthetic Sequence
  source 1..20: mol_type = other DNA
atctctaccatctcggagag

SEQ ID NO: 2779 - DNA, 20 bp, synthetic construct
  misc_feature 1..20: note = Synthetic Sequence
  source 1..20: mol_type = other DNA
cagcagtgtgctcccacctc

SEQ ID NO: 2780 - DNA, 20 bp, synthetic construct
  misc_feature 1..20: note = Synthetic Sequence
  source 1..20: mol_type = other DNA
agggacagaaattgtgcact

SEQ ID NO: 2781 - DNA, 20 bp, synthetic construct
  misc_feature 1..20: note = Synthetic Sequence
  source 1..20: mol_type = other DNA
tgagaggattccttgagccc

SEQ ID NO: 2782 - DNA, 20 bp, synthetic construct
  misc_feature 1..20: note = Synthetic Sequence
  source 1..20: mol_type = other DNA
gaaaaaaagttcatcatcac

SEQ ID NO: 2783 - DNA, 20 bp, synthetic construct
  misc_feature 1..20: note = Synthetic Sequence
  source 1..20: mol_type = other DNA
caagactagcctgaccaata

SEQ ID NO: 2784 - DNA, 20 bp, synthetic construct
  misc_feature 1..20: note = Synthetic Sequence
  source 1..20: mol_type = other DNA
tctacttgagggtggagggt

SEQ ID NO: 2785 - DNA, 20 bp, synthetic construct
  misc_feature 1..20: note = Synthetic Sequence
  source 1..20: mol_type = other DNA
caggtactatgcttattacc

SEQ ID NO: 2786 - DNA, 20 bp, synthetic construct
  misc_feature 1..20: note = Synthetic Sequence
  source 1..20: mol_type = other DNA
tctcatttaaacttcacaaa

SEQ ID NO: 2787 - DNA, 20 bp, synthetic construct
  misc_feature 1..20: note = Synthetic Sequence
  source 1..20: mol_type = other DNA
cagaagaatcgcttgaaccg

SEQ ID NO: 2788 - DNA, 20 bp, synthetic construct
  misc_feature 1..20: note = Synthetic Sequence
  source 1..20: mol_type = other DNA
tttattcacttgggtgcaag

SEQ ID NO: 2789 - DNA, 20 bp, synthetic construct
  misc_feature 1..20: note = Synthetic Sequence
  source 1..20: mol_type = other DNA
tcaggagtttgagaacagtc

SEQ ID NO: 2790 - DNA, 20 bp, synthetic construct
  misc_feature 1..20: note = Synthetic Sequence
  source 1..20: mol_type = other DNA
ttatacagatgtgaaaagag

SEQ ID NO: 2791 - DNA, 20 bp, synthetic construct
  misc_feature 1..20: note = Synthetic Sequence
  source 1..20: mol_type = other DNA
accagcttcttgtgggaggc

SEQ ID NO: 2792 - DNA, 20 bp, synthetic construct
  misc_feature 1..20: note = Synthetic Sequence
  source 1..20: mol_type = other DNA
tccagcctcccacaagaagc

SEQ ID NO: 2793 - DNA, 20 bp, synthetic construct
  misc_feature 1..20: note = Synthetic Sequence
  source 1..20: mol_type = other DNA
cctattaaataaatggtgct

SEQ ID NO: 2794 - DNA, 20 bp, synthetic construct
  misc_feature 1..20: note = Synthetic Sequence
  source 1..20: mol_type = other DNA
aaaaacaaccccatcaaaag

SEQ ID NO: 2795 - DNA, 20 bp, synthetic construct
  misc_feature 1..20: note = Synthetic Sequence
  source 1..20: mol_type = other DNA
aggaagcagactgctcctgc

SEQ ID NO: 2796 - DNA, 20 bp, synthetic construct
  misc_feature 1..20: note = Synthetic Sequence
  source 1..20: mol_type = other DNA
tttatccattcatccactga

SEQ ID NO: 2797 - DNA, 20 bp, synthetic construct
  misc_feature 1..20: note = Synthetic Sequence
  source 1..20: mol_type = other DNA
gatttattctttaacaagaa

SEQ ID NO: 2798 - DNA, 20 bp, synthetic construct
  misc_feature 1..20: note = Synthetic Sequence
  source 1..20: mol_type = other DNA
ccacatccccctctccgaga

SEQ ID NO: 2799 - DNA, 20 bp, synthetic construct
  misc_feature 1..20: note = Synthetic Sequence
  source 1..20: mol_type = other DNA
tccaggcgtccctgggcttg

SEQ ID NO: 2800 - DNA, 20 bp, synthetic construct
  misc_feature 1..20: note = Synthetic Sequence
  source 1..20: mol_type = other DNA
agcataccaaggacctgcac

SEQ ID NO: 2801 - DNA, 20 bp, synthetic construct
  misc_feature 1..20: note = Synthetic Sequence
  source 1..20: mol_type = other DNA
tcacaaaaacatgtgttgta

SEQ ID NO: 2802 - DNA, 20 bp, synthetic construct
  misc_feature 1..20: note = Synthetic Sequence
  source 1..20: mol_type = other DNA
cccagcaccatttatttaat

SEQ ID NO: 2803 - DNA, 20 bp, synthetic construct
  misc_feature 1..20: note = Synthetic Sequence
  source 1..20: mol_type = other DNA
gggatgtattaggctcataa

SEQ ID NO: 2804 - DNA, 20 bp, synthetic construct
  misc_feature 1..20: note = Synthetic Sequence
  source 1..20: mol_type = other DNA
agtccgaaaagagtcagcga

SEQ ID NO: 2805 - DNA, 20 bp, synthetic construct
  misc_feature 1..20: note = Synthetic Sequence
  source 1..20: mol_type = other DNA
ggtacatgtgcacgatgtgc

SEQ ID NO: 2806 - DNA, 20 bp, synthetic construct
  misc_feature 1..20: note = Synthetic Sequence
  source 1..20: mol_type = other DNA
aatcatgtcatcttcaaaca

SEQ ID NO: 2807 - DNA, 20 bp, synthetic construct
  misc_feature 1..20: note = Synthetic Sequence
  source 1..20: mol_type = other DNA
tcacaaggcaagtggagaca

SEQ ID NO: 2808 - DNA, 20 bp, synthetic construct
  misc_feature 1..20: note = Synthetic Sequence
  source 1..20: mol_type = other DNA
cctacttgggaggctgagac

SEQ ID NO: 2809 - DNA, 20 bp, synthetic construct
  misc_feature 1..20: note = Synthetic Sequence
  source 1..20: mol_type = other DNA
catgaaagacttctgaatcc

SEQ ID NO: 2810 - DNA, 20 bp, synthetic construct
  misc_feature 1..20: note = Synthetic Sequence
  source 1..20: mol_type = other DNA
gagaatggtgggaacccagg

SEQ ID NO: 2811 - DNA, 20 bp, synthetic construct
  misc_feature 1..20: note = Synthetic Sequence
  source 1..20: mol_type = other DNA
caaggaagaaggctttaatc

SEQ ID NO: 2812 - DNA, 20 bp, synthetic construct
  misc_feature 1..20: note = Synthetic Sequence
  source 1..20: mol_type = other DNA
tacttgagataatggagagc

SEQ ID NO: 2813 - DNA, 20 bp, synthetic construct
  misc_feature 1..20: note = Synthetic Sequence
  source 1..20: mol_type = other DNA
atcacaaggcaagtggagac

SEQ ID NO: 2814 - DNA, 20 bp, synthetic construct
  misc_feature 1..20: note = Synthetic Sequence
  source 1..20: mol_type = other DNA
ttatccagtctatcattgtt

SEQ ID NO: 2815 - DNA, 20 bp, synthetic construct
  misc_feature 1..20: note = Synthetic Sequence
  source 1..20: mol_type = other DNA
aattgaacaatgagaaaaca

SEQ ID NO: 2816 - DNA, 20 bp, synthetic construct
  misc_feature 1..20: note = Synthetic Sequence
  source 1..20: mol_type = other DNA
gtccgaaaagagtcagcgaa

SEQ ID NO: 2817 - DNA, 20 bp, synthetic construct
  misc_feature 1..20: note = Synthetic Sequence
  source 1..20: mol_type = other DNA
tgcctcagcctcctagtagc

SEQ ID NO: 2818 - DNA, 20 bp, synthetic construct
  misc_feature 1..20: note = Synthetic Sequence
  source 1..20: mol_type = other DNA
gtctgaggacccgaggtcgt

SEQ ID NO: 2819 - DNA, 20 bp, synthetic construct
  misc_feature 1..20: note = Synthetic Sequence
  source 1..20: mol_type = other DNA
agggatgtattaggctcata

SEQ ID NO: 2820 - DNA, 20 bp, synthetic construct
  misc_feature 1..20: note = Synthetic Sequence
  source 1..20: mol_type = other DNA
ggtaggcagatcatgaggtc

SEQ ID NO: 2821 - DNA, 20 bp, synthetic construct
  misc_feature 1..20: note = Synthetic Sequence
  source 1..20: mol_type = other DNA
tgatttattctttaacaaga

SEQ ID NO: 2822 - DNA, 20 bp, synthetic construct
  misc_feature 1..20: note = Synthetic Sequence
  source 1..20: mol_type = other DNA
acttagccaggcatggtggt

SEQ ID NO: 2823 - DNA, 20 bp, synthetic construct
  misc_feature 1..20: note = Synthetic Sequence
  source 1..20: mol_type = other DNA
cgcttgaacccacgaggcag

SEQ ID NO: 2824 - DNA, 20 bp, synthetic construct
  misc_feature 1..20: note = Synthetic Sequence
  source 1..20: mol_type = other DNA
ctggattcagaagtctttca

SEQ ID NO: 2825 - DNA, 20 bp, synthetic construct
  misc_feature 1..20: note = Synthetic Sequence
  source 1..20: mol_type = other DNA
ggctgaggcgggaggatcgc

SEQ ID NO: 2826 - DNA, 20 bp, synthetic construct
  misc_feature 1..20: note = Synthetic Sequence
  source 1..20: mol_type = other DNA
gctgaggcggacggatcatg

SEQ ID NO: 2827 - DNA, 20 bp, synthetic construct
  misc_feature 1..20: note = Synthetic Sequence
  source 1..20: mol_type = other DNA
tataataagcaaattgcaat

SEQ ID NO: 2828 - DNA, 20 bp, synthetic construct
  misc_feature 1..20: note = Synthetic Sequence
  source 1..20: mol_type = other DNA
gaagaacagctaatggatgc

SEQ ID NO: 2829 - DNA, 20 bp, synthetic construct
  misc_feature 1..20: note = Synthetic Sequence
  source 1..20: mol_type = other DNA
gccacaagcccagggacgcc

SEQ ID NO: 2830 - DNA, 20 bp, synthetic construct
  misc_feature 1..20: note = Synthetic Sequence
  source 1..20: mol_type = other DNA
aggtactatgcttattacct

SEQ ID NO: 2831 - DNA, 20 bp, synthetic construct
  misc_feature 1..20: note = Synthetic Sequence
  source 1..20: mol_type = other DNA
ttaggatatgaatggctgag

SEQ ID NO: 2832 - DNA, 20 bp, synthetic construct
  misc_feature 1..20: note = Synthetic Sequence
  source 1..20: mol_type = other DNA
gagcaaggggaaggtagcca

SEQ ID NO: 2833 - DNA, 20 bp, synthetic construct
  misc_feature 1..20: note = Synthetic Sequence
  source 1..20: mol_type = other DNA
ctgggaggcaccccccaaca

SEQ ID NO: 2834 - DNA, 20 bp, synthetic construct
  misc_feature 1..20: note = Synthetic Sequence
  source 1..20: mol_type = other DNA
ctgaggaagcctcacaatca

SEQ ID NO: 2835 - DNA, 20 bp, synthetic construct
  misc_feature 1..20: note = Synthetic Sequence
  source 1..20: mol_type = other DNA
tggaggtggggcctggtagg

SEQ ID NO: 2836 - DNA, 20 bp, synthetic construct
  misc_feature 1..20: note = Synthetic Sequence
  source 1..20: mol_type = other DNA
gtcgaggtgggcagatcatg

SEQ ID NO: 2837 - DNA, 20 bp, synthetic construct
  misc_feature 1..20: note = Synthetic Sequence
  source 1..20: mol_type = other DNA
acaatcatggcagaaggtaa

SEQ ID NO: 2838 - DNA, 20 bp, synthetic construct
  misc_feature 1..20: note = Synthetic Sequence
  source 1..20: mol_type = other DNA
aagcaagcaccttcttcaca

SEQ ID NO: 2839 - DNA, 20 bp, synthetic construct
  misc_feature 1..20: note = Synthetic Sequence
  source 1..20: mol_type = other DNA
gcagaaggcgaaggggaagc

SEQ ID NO: 2840 - DNA, 20 bp, synthetic construct
  misc_feature 1..20: note = Synthetic Sequence
  source 1..20: mol_type = other DNA
tgcttgaacccggtaggtgg

SEQ ID NO: 2841 - DNA, 20 bp, synthetic construct
  misc_feature 1..20: note = Synthetic Sequence
  source 1..20: mol_type = other DNA
gggagacatcacacgttggt

SEQ ID NO: 2842 - DNA, 20 bp, synthetic construct
  misc_feature 1..20: note = Synthetic Sequence
  source 1..20: mol_type = other DNA
gtgcatgcatcaagtgcaat

SEQ ID NO: 2843 - DNA, 20 bp, synthetic construct
  misc_feature 1..20: note = Synthetic Sequence
  source 1..20: mol_type = other DNA
gactgcagcctcaaccttcc

SEQ ID NO: 2844 - DNA, 20 bp, synthetic construct
  misc_feature 1..20: note = Synthetic Sequence
  source 1..20: mol_type = other DNA
gagaattgcttgaaaccgga

SEQ ID NO: 2845 - DNA, 20 bp, synthetic construct
  misc_feature 1..20: note = Synthetic Sequence
  source 1..20: mol_type = other DNA
ctaagcaacaaaacatcagc

SEQ ID NO: 2846 - DNA, 20 bp, synthetic construct
  misc_feature 1..20: note = Synthetic Sequence
  source 1..20: mol_type = other DNA
acgctagatgacgagttagt

SEQ ID NO: 2847 - DNA, 20 bp, synthetic construct
  misc_feature 1..20: note = Synthetic Sequence
  source 1..20: mol_type = other DNA
agaggaagagacagacaaag

SEQ ID NO: 2848 - DNA, 20 bp, synthetic construct
  misc_feature 1..20: note = Synthetic Sequence
  source 1..20: mol_type = other DNA
taccctatatggtctaaaag

SEQ ID NO: 2849 - DNA, 20 bp, synthetic construct
  misc_feature 1..20: note = Synthetic Sequence
  source 1..20: mol_type = other DNA
acaagggggcagggtaagga

SEQ ID NO: 2850 - DNA, 20 bp, synthetic construct
  misc_feature 1..20: note = Synthetic Sequence
  source 1..20: mol_type = other DNA
cctgtatttcactccatcct

SEQ ID NO: 2851 - DNA, 20 bp, synthetic construct
  misc_feature 1..20: note = Synthetic Sequence
  source 1..20: mol_type = other DNA
cataaaaaacaaatgatggc

SEQ ID NO: 2852 - DNA, 20 bp, synthetic construct
  misc_feature 1..20: note = Synthetic Sequence
  source 1..20: mol_type = other DNA
gtactatagatgactaagta

SEQ ID NO: 2853 - DNA, 20 bp, synthetic construct
  misc_feature 1..20: note = Synthetic Sequence
  source 1..20: mol_type = other DNA
aagaacagctaatggatgct

SEQ ID NO: 2854 - DNA, 20 bp, synthetic construct
  misc_feature 1..20: note = Synthetic Sequence
  source 1..20: mol_type = other DNA
gagatgggagtctacttctg

SEQ ID NO: 2855 - DNA, 20 bp, synthetic construct
  misc_feature 1..20: note = Synthetic Sequence
  source 1..20: mol_type = other DNA
aagagaaaacagctgggccc

SEQ ID NO: 2856 - DNA, 20 bp, synthetic construct
  misc_feature 1..20: note = Synthetic Sequence
  source 1..20: mol_type = other DNA
tgggaggcaccccccaacag

SEQ ID NO: 2857 - DNA, 20 bp, synthetic construct
  misc_feature 1..20: note = Synthetic Sequence
  source 1..20: mol_type = other DNA
aactgtaacactcactgtga

SEQ ID NO: 2858 - DNA, 20 bp, synthetic construct
  misc_feature 1..20: note = Synthetic Sequence
  source 1..20: mol_type = other DNA
ggatatgaatggctgagcgg

SEQ ID NO: 2859 - DNA, 20 bp, synthetic construct
  misc_feature 1..20: note = Synthetic Sequence
  source 1..20: mol_type = other DNA
agataaaagaaaaggcagct

SEQ ID NO: 2860 - DNA, 20 bp, synthetic construct
  misc_feature 1..20: note = Synthetic Sequence
  source 1..20: mol_type = other DNA
caggtgactgccaccacgcc

SEQ ID NO: 2861 - DNA, 20 bp, synthetic construct
  misc_feature 1..20: note = Synthetic Sequence
  source 1..20: mol_type = other DNA
tgagtgagtttcttaatcct

SEQ ID NO: 2862 - DNA, 20 bp, synthetic construct
  misc_feature 1..20: note = Synthetic Sequence
  source 1..20: mol_type = other DNA
gggagtctacttctggggga

SEQ ID NO: 2863 - DNA, 20 bp, synthetic construct
  misc_feature 1..20: note = Synthetic Sequence
  source 1..20: mol_type = other DNA
atataataagcaaattgcaa

SEQ ID NO: 2864 - DNA, 20 bp, synthetic construct
  misc_feature 1..20: note = Synthetic Sequence
  source 1..20: mol_type = other DNA
aagagatgggagtctacttc

SEQ ID NO: 2865 - DNA, 20 bp, synthetic construct
  misc_feature 1..20: note = Synthetic Sequence
  source 1..20: mol_type = other DNA
gcatacaagacaagggggca

SEQ ID NO: 2866 - DNA, 20 bp, synthetic construct
  misc_feature 1..20: note = Synthetic Sequence
  source 1..20: mol_type = other DNA
aagcaaattgcaatgggaag

SEQ ID NO: 2867 - DNA, 20 bp, synthetic construct
  misc_feature 1..20: note = Synthetic Sequence
  source 1..20: mol_type = other DNA
cgcttcagcctggaaggttg

SEQ ID NO: 2868 - DNA, 20 bp, synthetic construct
  misc_feature 1..20: note = Synthetic Sequence
  source 1..20: mol_type = other DNA
agagatgggagtctacttct

SEQ ID NO: 2869 - DNA, 20 bp, synthetic construct
  misc_feature 1..20: note = Synthetic Sequence
  source 1..20: mol_type = other DNA
gagataaaagaaaaggcagc

SEQ ID NO: 2870 - DNA, 20 bp, synthetic construct
  misc_feature 1..20: note = Synthetic Sequence
  source 1..20: mol_type = other DNA
aggggagggggtgtacgaac

SEQ ID NO: 2871 - DNA, 20 bp, synthetic construct
  misc_feature 1..20: note = Synthetic Sequence
  source 1..20: mol_type = other DNA
ctcaccattacactccagcc

SEQ ID NO: 2872 - DNA, 20 bp, synthetic construct
  misc_feature 1..20: note = Synthetic Sequence
  source 1..20: mol_type = other DNA
tgttggaggtggggtctggt

SEQ ID NO: 2873 - DNA, 20 bp, synthetic construct
  misc_feature 1..20: note = Synthetic Sequence
  source 1..20: mol_type = other DNA
aaaaccctagaagaaaagct

SEQ ID NO: 2874 - DNA, 20 bp, synthetic construct
  misc_feature 1..20: note = Synthetic Sequence
  source 1..20: mol_type = other DNA
aaaaacaaatgatggcagga

SEQ ID NO: 2875 - DNA, 20 bp, synthetic construct
  misc_feature 1..20: note = Synthetic Sequence
  source 1..20: mol_type = other DNA
aatatttgtcattctgtgcc

SEQ ID NO: 2876 - DNA, 20 bp, synthetic construct
  misc_feature 1..20: note = Synthetic Sequence
  source 1..20: mol_type = other DNA
tcgagagattgagaccatcc

SEQ ID NO: 2877 - DNA, 20 bp, synthetic construct
  misc_feature 1..20: note = Synthetic Sequence
  source 1..20: mol_type = other DNA
tgcccaggctggtcaactcc

SEQ ID NO: 2878 - DNA, 20 bp, synthetic construct
  misc_feature 1..20: note = Synthetic Sequence
  source 1..20: mol_type = other DNA
gacatgggtggggacaaata

SEQ ID NO: 2879 - DNA, 20 bp, synthetic construct
  misc_feature 1..20: note = Synthetic Sequence
  source 1..20: mol_type = other DNA
acacacacgtatgtttattg

SEQ ID NO: 2880 - DNA, 20 bp, synthetic construct
  misc_feature 1..20: note = Synthetic Sequence
  source 1..20: mol_type = other DNA
agacccaacaccaggtcatg

SEQ ID NO: 2881 - DNA, 20 bp, synthetic construct
  misc_feature 1..20: note = Synthetic Sequence
  source 1..20: mol_type = other DNA
ttgttcagggctcagtcctt

SEQ ID NO: 2882 - DNA, 20 bp, synthetic construct
  misc_feature 1..20: note = Synthetic Sequence
  source 1..20: mol_type = other DNA
aatgaagccgtggaccctca

SEQ ID NO: 2883 - DNA, 20 bp, synthetic construct
  misc_feature 1..20: note = Synthetic Sequence
  source 1..20: mol_type = other DNA
gcctaggcgggtggatcatg

SEQ ID NO: 2884 - DNA, 20 bp, synthetic construct
  misc_feature 1..20: note = Synthetic Sequence
  source 1..20: mol_type = other DNA
gactacttgctagcagctga

SEQ ID NO: 2885 - DNA, 20 bp, synthetic construct
  misc_feature 1..20: note = Synthetic Sequence
  source 1..20: mol_type = other DNA
cagaagaagacaagaaaatg

SEQ ID NO: 2886 - DNA, 20 bp, synthetic construct
  misc_feature 1..20: note = Synthetic Sequence
  source 1..20: mol_type = other DNA
tggaaaattacagttaaagg

SEQ ID NO: 2887 - DNA, 20 bp, synthetic construct
  misc_feature 1..20: note = Synthetic Sequence
  source 1..20: mol_type = other DNA
tgtgaagactggtgtgggaa

SEQ ID NO: 2888 - DNA, 20 bp, synthetic construct
  misc_feature 1..20: note = Synthetic Sequence
  source 1..20: mol_type = other DNA
tcaccattacactccagcct

SEQ ID NO: 2889 - DNA, 20 bp, synthetic construct
  misc_feature 1..20: note = Synthetic Sequence
  source 1..20: mol_type = other DNA
gatcattatctctaccatct

SEQ ID NO: 2890 - DNA, 20 bp, synthetic construct
  misc_feature 1..20: note = Synthetic Sequence
  source 1..20: mol_type = other DNA
aggggagggagtatacgaat

SEQ ID NO: 2891 - DNA, 20 bp, synthetic construct
  misc_feature 1..20: note = Synthetic Sequence
  source 1..20: mol_type = other DNA
cccgtgacacagccctcagg

SEQ ID NO: 2892 - DNA, 20 bp, synthetic construct
  misc_feature 1..20: note = Synthetic Sequence
  source 1..20: mol_type = other DNA
ctgacgacatgtgcccaagg

SEQ ID NO: 2893 - DNA, 20 bp, synthetic construct
  misc_feature 1..20: note = Synthetic Sequence
  source 1..20: mol_type = other DNA
aacgctagatgacgagttag

SEQ ID NO: 2894 - DNA, 20 bp, synthetic construct
  misc_feature 1..20: note = Synthetic Sequence
  source 1..20: mol_type = other DNA
acatagctatacatgtgcca

SEQ ID NO: 2895 - DNA, 20 bp, synthetic construct
  misc_feature 1..20: note = Synthetic Sequence
  source 1..20: mol_type = other DNA
aaagtaggcaaaaagttaaa

SEQ ID NO: 2896 - DNA, 20 bp, synthetic construct
  misc_feature 1..20: note = Synthetic Sequence
  source 1..20: mol_type = other DNA
ctaactcgtcatctagcgtt

SEQ ID NO: 2897 - DNA, 20 bp, synthetic construct
  misc_feature 1..20: note = Synthetic Sequence
  source 1..20: mol_type = other DNA
gagattcacttgaacctggg

SEQ ID NO: 2898 - DNA, 20 bp, synthetic construct
  misc_feature 1..20: note = Synthetic Sequence
  source 1..20: mol_type = other DNA
tcaagaccatctggccaaca

SEQ ID NO: 2899 - DNA, 20 bp, synthetic construct
  misc_feature 1..20: note = Synthetic Sequence
  source 1..20: mol_type = other DNA
acaaatgatggcaggatggc

SEQ ID NO: 2900 - DNA, 20 bp, synthetic construct
  misc_feature 1..20: note = Synthetic Sequence
  source 1..20: mol_type = other DNA
cagacggggtttcaccgtgt

SEQ ID NO: 2901 - DNA, 20 bp, synthetic construct
  misc_feature 1..20: note = Synthetic Sequence
  source 1..20: mol_type = other DNA
gggaggcttcacaatcatgg

SEQ ID NO: 2902 - DNA, 20 bp, synthetic construct
  misc_feature 1..20: note = Synthetic Sequence
  source 1..20: mol_type = other DNA
gacaagggggcagggtaagg

SEQ ID NO: 2903 - DNA, 20 bp, synthetic construct
  misc_feature 1..20: note = Synthetic Sequence
  source 1..20: mol_type = other DNA
aattaggtgggtgtggtggc

SEQ ID NO: 2904 - DNA, 20 bp, synthetic construct
  misc_feature 1..20: note = Synthetic Sequence
  source 1..20: mol_type = other DNA
ataaagaaaagaagtttatt

SEQ ID NO: 2905 - DNA, 20 bp, synthetic construct
  misc_feature 1..20: note = Synthetic Sequence
  source 1..20: mol_type = other DNA
gcagggatgctccacagggc

SEQ ID NO: 2906 - DNA, 20 bp, synthetic construct
  misc_feature 1..20: note = Synthetic Sequence
  source 1..20: mol_type = other DNA
cagtcatggcagaaggtgaa

SEQ ID NO: 2907 - DNA, 20 bp, synthetic construct
  misc_feature 1..20: note = Synthetic Sequence
  source 1..20: mol_type = other DNA
agggagtatacgaataggtg

SEQ ID NO: 2908 - DNA, 20 bp, synthetic construct
  misc_feature 1..20: note = Synthetic Sequence
  source 1..20: mol_type = other DNA
tccagagatcgagaccatcc

SEQ ID NO: 2909 - DNA, 20 bp, synthetic construct
  misc_feature 1..20: note = Synthetic Sequence
  source 1..20: mol_type = other DNA
ttattatactttaagcttta

SEQ ID NO: 2910 - DNA, 20 bp, synthetic construct
  misc_feature 1..20: note = Synthetic Sequence
  source 1..20: mol_type = other DNA
gacagtctcgctctgtcgcc

SEQ ID NO: 2911 - DNA, 20 bp, synthetic construct
  misc_feature 1..20: note = Synthetic Sequence
  source 1..20: mol_type = other DNA
tgagaccagcctggccaagg

SEQ ID NO: 2912 - DNA, 20 bp, synthetic construct
  misc_feature 1..20: note = Synthetic Sequence
  source 1..20: mol_type = other DNA
tccaggaagagagactgact

SEQ ID NO: 2913 - DNA, 20 bp, synthetic construct
  misc_feature 1..20: note = Synthetic Sequence
  source 1..20: mol_type = other DNA
aattagctgggtgtggttgt

SEQ ID NO: 2914 - DNA, 20 bp, synthetic construct
  misc_feature 1..20: note = Synthetic Sequence
  source 1..20: mol_type = other DNA
ctaaaaccccttgtggcctt

SEQ ID NO: 2915 - DNA, 20 bp, synthetic construct
  misc_feature 1..20: note = Synthetic Sequence
  source 1..20: mol_type = other DNA
tttgtaaattgctcagtctc

SEQ ID NO: 2916 - DNA, 20 bp, synthetic construct
  misc_feature 1..20: note = Synthetic Sequence
  source 1..20: mol_type = other DNA
gatggagatggtttactatc

SEQ ID NO: 2917 - DNA, 20 bp, synthetic construct
  misc_feature 1..20: note = Synthetic Sequence
  source 1..20: mol_type = other DNA
atggcatgaacccaggaggc

SEQ ID NO: 2918 - DNA, 20 bp, synthetic construct
  misc_feature 1..20: note = Synthetic Sequence
  source 1..20: mol_type = other DNA
agaaggccacgtggagacgg

SEQ ID NO: 2919 - DNA, 20 bp, synthetic construct
  misc_feature 1..20: note = Synthetic Sequence
  source 1..20: mol_type = other DNA
cctcacaatcatggcagaag

SEQ ID NO: 2920 - DNA, 20 bp, synthetic construct
  misc_feature 1..20: note = Synthetic Sequence
  source 1..20: mol_type = other DNA
cgcttgatcccaggaggcag

SEQ ID NO: 2921 - DNA, 20 bp, synthetic construct
  misc_feature 1..20: note = Synthetic Sequence
  source 1..20: mol_type = other DNA
ctatatcataattaagttca

SEQ ID NO: 2922 - DNA, 20 bp, synthetic construct
  misc_feature 1..20: note = Synthetic Sequence
  source 1..20: mol_type = other DNA
cactaccggtctccgcgcat

SEQ ID NO: 2923 - DNA, 20 bp, synthetic construct
  misc_feature 1..20: note = Synthetic Sequence
  source 1..20: mol_type = other DNA
atgcacacgtatgtttattt

SEQ ID NO: 2924 - DNA, 20 bp, synthetic construct
  misc_feature 1..20: note = Synthetic Sequence
  source 1..20: mol_type = other DNA
tttatccggtctatcattga

SEQ ID NO: 2925 - DNA, 20 bp, synthetic construct
  misc_feature 1..20: note = Synthetic Sequence
  source 1..20: mol_type = other DNA
aaagctaggcaataccattc

SEQ ID NO: 2926 - DNA, 20 bp, synthetic construct
  misc_feature 1..20: note = Synthetic Sequence
  source 1..20: mol_type = other DNA
tgatggagatggtttactat

SEQ ID NO: 2927 - DNA, 20 bp, synthetic construct
  misc_feature 1..20: note = Synthetic Sequence
  source 1..20: mol_type = other DNA
actgggaggcaccccccaac

SEQ ID NO: 2928 - DNA, 20 bp, synthetic construct
  misc_feature 1..20: note = Synthetic Sequence
  source 1..20: mol_type = other DNA
agatttatttgccaaagtta

SEQ ID NO: 2929 - DNA, 20 bp, synthetic construct
  misc_feature 1..20: note = Synthetic Sequence
  source 1..20: mol_type = other DNA
gttgattgaattggctactg

SEQ ID NO: 2930 - DNA, 20 bp, synthetic construct
  misc_feature 1..20: note = Synthetic Sequence
  source 1..20: mol_type = other DNA
gagaatcgcttgaactctgg

SEQ ID NO: 2931 - DNA, 20 bp, synthetic construct
  misc_feature 1..20: note = Synthetic Sequence
  source 1..20: mol_type = other DNA
gctaacgctcaaaattctct

SEQ ID NO: 2932 - DNA, 20 bp, synthetic construct
  misc_feature 1..20: note = Synthetic Sequence
  source 1..20: mol_type = other DNA
gcccagtcagtctctcttcc

SEQ ID NO: 2933 - DNA, 20 bp, synthetic construct
  misc_feature 1..20: note = Synthetic Sequence
  source 1..20: mol_type = other DNA
cctcactttgttgcccaggc

SEQ ID NO: 2934 - DNA, 20 bp, synthetic construct
  misc_feature 1..20: note = Synthetic Sequence
  source 1..20: mol_type = other DNA
tagctatacatgtgccatgg

SEQ ID NO: 2935 - DNA, 20 bp, synthetic construct
  misc_feature 1..20: note = Synthetic Sequence
  source 1..20: mol_type = other DNA
ctacatatcatccatatatc

SEQ ID NO: 2936 - DNA, 20 bp, synthetic construct
  misc_feature 1..20: note = Synthetic Sequence
  source 1..20: mol_type = other DNA
ggcaccgaggcaagagacag

SEQ ID NO: 2937 - DNA, 20 bp, synthetic construct
  misc_feature 1..20: note = Synthetic Sequence
  source 1..20: mol_type = other DNA
ttacaattccacatgagatt

SEQ ID NO: 2938 - DNA, 20 bp, synthetic construct
  misc_feature 1..20: note = Synthetic Sequence
  source 1..20: mol_type = other DNA
gggagtatacgaataggtgt

SEQ ID NO: 2939 - DNA, 20 bp, synthetic construct
  misc_feature 1..20: note = Synthetic Sequence
  source 1..20: mol_type = other DNA
aatatctcaaaaaggatggg

SEQ ID NO: 2940 - DNA, 20 bp, synthetic construct
  misc_feature 1..20: note = Synthetic Sequence
  source 1..20: mol_type = other DNA
tacaattccacatgagattt

SEQ ID NO: 2941 - DNA, 20 bp, synthetic construct
  misc_feature 1..20: note = Synthetic Sequence
  source 1..20: mol_type = other DNA
gaggatcgcttcagcctgga

SEQ ID NO: 2942 - DNA, 20 bp, synthetic construct
  misc_feature 1..20: note = Synthetic Sequence
  source 1..20: mol_type = other DNA
agcagtgtgctcccacctca

SEQ ID NO: 2943 - DNA, 20 bp, synthetic construct
  misc_feature 1..20: note = Synthetic Sequence
  source 1..20: mol_type = other DNA
tatatcataattaagttcaa

SEQ ID NO: 2944 - DNA, 20 bp, synthetic construct
  misc_feature 1..20: note = Synthetic Sequence
  source 1..20: mol_type = other DNA
tttgactgaagggaatcaaa

SEQ ID NO: 2945 - DNA, 20 bp, synthetic construct
  misc_feature 1..20: note = Synthetic Sequence
  source 1..20: mol_type = other DNA
gaggaagttaaactttaaaa

SEQ ID NO: 2946 - DNA, 20 bp, synthetic construct
  misc_feature 1..20: note = Synthetic Sequence
  source 1..20: mol_type = other DNA
gccaggatggtcttgatctc

SEQ ID NO: 2947 - DNA, 20 bp, synthetic construct
  misc_feature 1..20: note = Synthetic Sequence
  source 1..20: mol_type = other DNA
caggagaatcgcttaagccc

SEQ ID NO: 2948 - DNA, 20 bp, synthetic construct
  misc_feature 1..20: note = Synthetic Sequence
  source 1..20: mol_type = other DNA
ttaatttcgcctcggtcctg

SEQ ID NO: 2949 - DNA, 20 bp, synthetic construct
  misc_feature 1..20: note = Synthetic Sequence
  source 1..20: mol_type = other DNA
caggcacccgccacgacgcc

SEQ ID NO: 2950 - DNA, 20 bp, synthetic construct
  misc_feature 1..20: note = Synthetic Sequence
  source 1..20: mol_type = other DNA
agggtattatccattcatga

SEQ ID NO: 2951 - DNA, 20 bp, synthetic construct
  misc_feature 1..20: note = Synthetic Sequence
  source 1..20: mol_type = other DNA
gtgagactccatcttataaa

SEQ ID NO: 2952 - DNA, 20 bp, synthetic construct
  misc_feature 1..20: note = Synthetic Sequence
  source 1..20: mol_type = other DNA
agtgatgtggccacaagccc

SEQ ID NO: 2953 - DNA, 20 bp, synthetic construct
  misc_feature 1..20: note = Synthetic Sequence
  source 1..20: mol_type = other DNA
cttccaggacctttgactga

SEQ ID NO: 2954 - DNA, 20 bp, synthetic construct
  misc_feature 1..20: note = Synthetic Sequence
  source 1..20: mol_type = other DNA
ctccaaagaagatatacaag

SEQ ID NO: 2955 - DNA, 20 bp, synthetic construct
  misc_feature 1..20: note = Synthetic Sequence
  source 1..20: mol_type = other DNA
ataaggaaaagaggtttaat

SEQ ID NO: 2956 - DNA, 20 bp, synthetic construct
  misc_feature 1..20: note = Synthetic Sequence
  source 1..20: mol_type = other DNA
gttaccctatatggtctaaa

SEQ ID NO: 2957 - DNA, 20 bp, synthetic construct
  misc_feature 1..20: note = Synthetic Sequence
  source 1..20: mol_type = other DNA
aatagtgctgcagtaaacat

SEQ ID NO: 2958 - DNA, 20 bp, synthetic construct
  misc_feature 1..20: note = Synthetic Sequence
  source 1..20: mol_type = other DNA
ccctattaaataaatggtgc

SEQ ID NO: 2959 - DNA, 20 bp, synthetic construct
  misc_feature 1..20: note = Synthetic Sequence
  source 1..20: mol_type = other DNA
aaaaaggagccaggcactga

SEQ ID NO: 2960 - DNA, 20 bp, synthetic construct
  misc_feature 1..20: note = Synthetic Sequence
  source 1..20: mol_type = other DNA
gaccactgtgaagactggtg

SEQ ID NO: 2961 - DNA, 20 bp, synthetic construct
  misc_feature 1..20: note = Synthetic Sequence
  source 1..20: mol_type = other DNA
aatgcactctctctccttga

SEQ ID NO: 2962 - DNA, 20 bp, synthetic construct
  misc_feature 1..20: note = Synthetic Sequence
  source 1..20: mol_type = other DNA
ctgaggcctccccaaccatg

SEQ ID NO: 2963 - DNA, 20 bp, synthetic construct
  misc_feature 1..20: note = Synthetic Sequence
  source 1..20: mol_type = other DNA
ctgtgaagactggtgtggga

SEQ ID NO: 2964 - DNA, 20 bp, synthetic construct
  misc_feature 1..20: note = Synthetic Sequence
  source 1..20: mol_type = other DNA
atttgattcccttcagtcaa

SEQ ID NO: 2965 - DNA, 20 bp, synthetic construct
  misc_feature 1..20: note = Synthetic Sequence
  source 1..20: mol_type = other DNA
tcccacaccagtcttcacag

SEQ ID NO: 2966 - DNA, 20 bp, synthetic construct
  misc_feature 1..20: note = Synthetic Sequence
  source 1..20: mol_type = other DNA
gcaggaggatggcttgaacc

SEQ ID NO: 2967 - DNA, 20 bp, synthetic construct
  misc_feature 1..20: note = Synthetic Sequence
  source 1..20: mol_type = other DNA
atagaaataatgcttatcac

SEQ ID NO: 2968 - DNA, 20 bp, synthetic construct
  misc_feature 1..20: note = Synthetic Sequence
  source 1..20: mol_type = other DNA
cagcaggagggacaatgatc

SEQ ID NO: 2969 - DNA, 20 bp, synthetic construct
  misc_feature 1..20: note = Synthetic Sequence
  source 1..20: mol_type = other DNA
caggagattggcgtgaaccc

SEQ ID NO: 2970 - DNA, 20 bp, synthetic construct
  misc_feature 1..20: note = Synthetic Sequence
  source 1..20: mol_type = other DNA
ccctgaaaactcccccactc

SEQ ID NO: 2971 - DNA, 20 bp, synthetic construct
  misc_feature 1..20: note = Synthetic Sequence
  source 1..20: mol_type = other DNA
tgagaccatcctggccaaaa

SEQ ID NO: 2972 - DNA, 20 bp, synthetic construct
  misc_feature 1..20: note = Synthetic Sequence
  source 1..20: mol_type = other DNA
acaaggtggatggattagtt

SEQ ID NO: 2973 - DNA, 20 bp, synthetic construct
  misc_feature 1..20: note = Synthetic Sequence
  source 1..20: mol_type = other DNA
accactgtgaagactggtgt

SEQ ID NO: 2974 - DNA, 20 bp, synthetic construct
  misc_feature 1..20: note = Synthetic Sequence
  source 1..20: mol_type = other DNA
caggagaatggtgtgagcct

SEQ ID NO: 2975 - DNA, 20 bp, synthetic construct
  misc_feature 1..20: note = Synthetic Sequence
  source 1..20: mol_type = other DNA
taccaccaatgcgcggagac

SEQ ID NO: 2976 - DNA, 20 bp, synthetic construct
  misc_feature 1..20: note = Synthetic Sequence
  source 1..20: mol_type = other DNA
aagattgtgccactgcaatc

SEQ ID NO: 2977 - DNA, 20 bp, synthetic construct
  misc_feature 1..20: note = Synthetic Sequence
  source 1..20: mol_type = other DNA
ccagcaccatttatttaata

SEQ ID NO: 2978 - DNA, 20 bp, synthetic construct
  misc_feature 1..20: note = Synthetic Sequence
  source 1..20: mol_type = other DNA
gcacgagaatagcttgaacc

SEQ ID NO: 2979 - DNA, 20 bp, synthetic construct
  misc_feature 1..20: note = Synthetic Sequence
  source 1..20: mol_type = other DNA
ttgatggacggatggctaca

SEQ ID NO: 2980 - DNA, 20 bp, synthetic construct
  misc_feature 1..20: note = Synthetic Sequence
  source 1..20: mol_type = other DNA
ctacatggatgtgatggaga

SEQ ID NO: 2981 - DNA, 20 bp, synthetic construct
  misc_feature 1..20: note = Synthetic Sequence
  source 1..20: mol_type = other DNA
tgtgtgaacccaggaggcgg

SEQ ID NO: 2982 - DNA, 20 bp, synthetic construct
  misc_feature 1..20: note = Synthetic Sequence
  source 1..20: mol_type = other DNA
ccagagatcgccaaactctc

SEQ ID NO: 2983 - DNA, 20 bp, synthetic construct
  misc_feature 1..20: note = Synthetic Sequence
  source 1..20: mol_type = other DNA
aatcatggtggaagacaagg

SEQ ID NO: 2984 - DNA, 20 bp, synthetic construct
  misc_feature 1..20: note = Synthetic Sequence
  source 1..20: mol_type = other DNA
gaatagtgctgcagtaaaca

SEQ ID NO: 2985 - DNA, 20 bp, synthetic construct
  misc_feature 1..20: note = Synthetic Sequence
  source 1..20: mol_type = other DNA
tcacatgcaaagacacatat

SEQ ID NO: 2986 - DNA, 20 bp, synthetic construct
  misc_feature 1..20: note = Synthetic Sequence
  source 1..20: mol_type = other DNA
cccagctgctcgggacgctg

SEQ ID NO: 2987 - DNA, 20 bp, synthetic construct
  misc_feature 1..20: note = Synthetic Sequence
  source 1..20: mol_type = other DNA
gaatcacttgaactgggaga

SEQ ID NO: 2988 - DNA, 20 bp, synthetic construct
  misc_feature 1..20: note = Synthetic Sequence
  source 1..20: mol_type = other DNA
gagaatggtgtgagcctggg

SEQ ID NO: 2989 - DNA, 20 bp, synthetic construct
  misc_feature 1..20: note = Synthetic Sequence
  source 1..20: mol_type = other DNA
aggagctggtgttaacttac

SEQ ID NO: 2990 - DNA, 20 bp, synthetic construct
  misc_feature 1..20: note = Synthetic Sequence
  source 1..20: mol_type = other DNA
ggtaacgccagtgtctggga

SEQ ID NO: 2991 - DNA, 20 bp, synthetic construct
  misc_feature 1..20: note = Synthetic Sequence
  source 1..20: mol_type = other DNA
cgcctaaaatcccagcactt

SEQ ID NO: 2992 - DNA, 20 bp, synthetic construct
  misc_feature 1..20: note = Synthetic Sequence
  source 1..20: mol_type = other DNA
tgtaagcccttaaaagggct

SEQ ID NO: 2993 - DNA, 20 bp, synthetic construct
  misc_feature 1..20: note = Synthetic Sequence
  source 1..20: mol_type = other DNA
tggggagaatagaaccaagt

SEQ ID NO: 2994 - DNA, 20 bp, synthetic construct
  misc_feature 1..20: note = Synthetic Sequence
  source 1..20: mol_type = other DNA
tatctcaaaaaggatgggtg

SEQ ID NO: 2995 - DNA, 20 bp, synthetic construct
  misc_feature 1..20: note = Synthetic Sequence
  source 1..20: mol_type = other DNA
tcatacagaagagctctggc

SEQ ID NO: 2996 - DNA, 20 bp, synthetic construct
  misc_feature 1..20: note = Synthetic Sequence
  source 1..20: mol_type = other DNA
ccaacgtgtgatgtctcccc

SEQ ID NO: 2997 - DNA, 20 bp, synthetic construct
  misc_feature 1..20: note = Synthetic Sequence
  source 1..20: mol_type = other DNA
cctcagcgtcccgagcagct

SEQ ID NO: 2998 - DNA, 20 bp, synthetic construct
  misc_feature 1..20: note = Synthetic Sequence
  source 1..20: mol_type = other DNA
cacagccctccatatttatt

SEQ ID NO: 2999 - DNA, 20 bp, synthetic construct
  misc_feature 1..20: note = Synthetic Sequence
  source 1..20: mol_type = other DNA
gagaatgtcatgaacctggg

SEQ ID NO: 3000 - DNA, 20 bp, synthetic construct
  misc_feature 1..20: note = Synthetic Sequence
  source 1..20: mol_type = other DNA
acctatcaagacctgtatcc

SEQ ID NO: 3001 - DNA, 20 bp, synthetic construct
  misc_feature 1..20: note = Synthetic Sequence
  source 1..20: mol_type = other DNA
atggggagctggaaagggga

SEQ ID NO: 3002 - DNA, 20 bp, synthetic construct
  misc_feature 1..20: note = Synthetic Sequence
  source 1..20: mol_type = other DNA
ttaatcaagccccttcctcg

SEQ ID NO: 3003 - DNA, 20 bp, synthetic construct
  misc_feature 1..20: note = Synthetic Sequence
  source 1..20: mol_type = other DNA
caacaaaagaagaccccatc

SEQ ID NO: 3004 - DNA, 20 bp, synthetic construct
  misc_feature 1..20: note = Synthetic Sequence
  source 1..20: mol_type = other DNA
gttaatcaagccccttcctc

SEQ ID NO: 3005 - DNA, 20 bp, synthetic construct
  misc_feature 1..20: note = Synthetic Sequence
  source 1..20: mol_type = other DNA
atattaactttaaaggtaaa

SEQ ID NO: 3006 - DNA, 20 bp, synthetic construct
  misc_feature 1..20: note = Synthetic Sequence
  source 1..20: mol_type = other DNA
tacaagcatgaaccaccata

SEQ ID NO: 3007 - DNA, 20 bp, synthetic construct
  misc_feature 1..20: note = Synthetic Sequence
  source 1..20: mol_type = other DNA
ttgagtgagtttcttaatcc

SEQ ID NO: 3008 - DNA, 20 bp, synthetic construct
  misc_feature 1..20: note = Synthetic Sequence
  source 1..20: mol_type = other DNA
tcccgagtaactggaattac

SEQ ID NO: 3009 - DNA, 20 bp, synthetic construct
  misc_feature 1..20: note = Synthetic Sequence
  source 1..20: mol_type = other DNA
ttggcaacaccgtattctgc

SEQ ID NO: 3010 - DNA, 20 bp, synthetic construct
  misc_feature 1..20: note = Synthetic Sequence
  source 1..20: mol_type = other DNA
agtccaggagttgaccagcc

SEQ ID NO: 3011 - DNA, 20 bp, synthetic construct
  misc_feature 1..20: note = Synthetic Sequence
  source 1..20: mol_type = other DNA
gcaggaaaacatgtgagcaa

SEQ ID NO: 3012 - DNA, 20 bp, synthetic construct
  misc_feature 1..20: note = Synthetic Sequence
  source 1..20: mol_type = other DNA
attcagaataaacattccat

SEQ ID NO: 3013 - DNA, 20 bp, synthetic construct
  misc_feature 1..20: note = Synthetic Sequence
  source 1..20: mol_type = other DNA
aagaaaaggcagctgggccc

SEQ ID NO: 3014 - DNA, 20 bp, synthetic construct
  misc_feature 1..20: note = Synthetic Sequence
  source 1..20: mol_type = other DNA
gtccaggagttgaccagcct

SEQ ID NO: 3015 - DNA, 20 bp, synthetic construct
  misc_feature 1..20: note = Synthetic Sequence
  source 1..20: mol_type = other DNA
aggagacacagacacagagg

SEQ ID NO: 3016 - DNA, 20 bp, synthetic construct
  misc_feature 1..20: note = Synthetic Sequence
  source 1..20: mol_type = other DNA
gtcctgacgacatgtgccca

SEQ ID NO: 3017 - DNA, 20 bp, synthetic construct
  misc_feature 1..20: note = Synthetic Sequence
  source 1..20: mol_type = other DNA
caataaatatcagcgcagcc

SEQ ID NO: 3018 - DNA, 20 bp, synthetic construct
  misc_feature 1..20: note = Synthetic Sequence
  source 1..20: mol_type = other DNA
aggaagatataccaagcaaa

SEQ ID NO: 3019 - DNA, 20 bp, synthetic construct
  misc_feature 1..20: note = Synthetic Sequence
  source 1..20: mol_type = other DNA
aggattccctattaaataaa

SEQ ID NO: 3020 - DNA, 20 bp, synthetic construct
  misc_feature 1..20: note = Synthetic Sequence
  source 1..20: mol_type = other DNA
aaaacataaaaaacaaatga

SEQ ID NO: 3021 - DNA, 20 bp, synthetic construct
  misc_feature 1..20: note = Synthetic Sequence
  source 1..20: mol_type = other DNA
taggtaaacttgtgtcatga

SEQ ID NO: 3022 - DNA, 20 bp, synthetic construct
  misc_feature 1..20: note = Synthetic Sequence
  source 1..20: mol_type = other DNA
gcatcaatatggtgacctcc

SEQ ID NO: 3023 - DNA, 20 bp, synthetic construct
  misc_feature 1..20: note = Synthetic Sequence
  source 1..20: mol_type = other DNA
ctcttgaacttgggaggcgg

SEQ ID NO: 3024 - DNA, 20 bp, synthetic construct
  misc_feature 1..20: note = Synthetic Sequence
  source 1..20: mol_type = other DNA
cccagaactctgggaggcca

SEQ ID NO: 3025 - DNA, 20 bp, synthetic construct
  misc_feature 1..20: note = Synthetic Sequence
  source 1..20: mol_type = other DNA
agctggaaaggggatggagt

SEQ ID NO: 3026 - DNA, 20 bp, synthetic construct
  misc_feature 1..20: note = Synthetic Sequence
  source 1..20: mol_type = other DNA
agttaatcaagccccttcct

SEQ ID NO: 3027 - DNA, 20 bp, synthetic construct
  misc_feature 1..20: note = Synthetic Sequence
  source 1..20: mol_type = other DNA
atccaggaagagagactgac

SEQ ID NO: 3028 - DNA, 20 bp, synthetic construct
  misc_feature 1..20: note = Synthetic Sequence
  source 1..20: mol_type = other DNA
aacaaaccagcaatcctgag

SEQ ID NO: 3029 - DNA, 20 bp, synthetic construct
  misc_feature 1..20: note = Synthetic Sequence
  source 1..20: mol_type = other DNA
tcacagccgaattgtaccag

SEQ ID NO: 3030 - DNA, 20 bp, synthetic construct
  misc_feature 1..20: note = Synthetic Sequence
  source 1..20: mol_type = other DNA
gagacggggtttgtccatgt

SEQ ID NO: 3031 - DNA, 20 bp, synthetic construct
  misc_feature 1..20: note = Synthetic Sequence
  source 1..20: mol_type = other DNA
aaagaaaaggcagctgggcc

SEQ ID NO: 3032 - DNA, 20 bp, synthetic construct
  misc_feature 1..20: note = Synthetic Sequence
  source 1..20: mol_type = other DNA
gtctacttgagggtggaggg

SEQ ID NO: 3033 - DNA, 20 bp, synthetic construct
  misc_feature 1..20: note = Synthetic Sequence
  source 1..20: mol_type = other DNA
tgtggcaggtggatcacctg

SEQ ID NO: 3034 - DNA, 20 bp, synthetic construct
  misc_feature 1..20: note = Synthetic Sequence
  source 1..20: mol_type = other DNA
ggtactatagatgactaagt

SEQ ID NO: 3035 - DNA, 20 bp, synthetic construct
  misc_feature 1..20: note = Synthetic Sequence
  source 1..20: mol_type = other DNA
aagggcaataaaagatcaca

SEQ ID NO: 3036 - DNA, 20 bp, synthetic construct
  misc_feature 1..20: note = Synthetic Sequence
  source 1..20: mol_type = other DNA
agctactgggaaggctgaca

SEQ ID NO: 3037 - DNA, 20 bp, synthetic construct
  misc_feature 1..20: note = Synthetic Sequence
  source 1..20: mol_type = other DNA
acactcactgtgagggtctg

SEQ ID NO: 3038 - DNA, 20 bp, synthetic construct
  misc_feature 1..20: note = Synthetic Sequence
  source 1..20: mol_type = other DNA
tagatattgcattagcaact

SEQ ID NO: 3039 - DNA, 20 bp, synthetic construct
  misc_feature 1..20: note = Synthetic Sequence
  source 1..20: mol_type = other DNA
tcttcatatggctgggaatc

SEQ ID NO: 3040 - DNA, 20 bp, synthetic construct
  misc_feature 1..20: note = Synthetic Sequence
  source 1..20: mol_type = other DNA
actccagccttggacaacag

SEQ ID NO: 3041 - DNA, 20 bp, synthetic construct
  misc_feature 1..20: note = Synthetic Sequence
  source 1..20: mol_type = other DNA
tggtaggattgcttgagcct

SEQ ID NO: 3042 - DNA, 20 bp, synthetic construct
  misc_feature 1..20: note = Synthetic Sequence
  source 1..20: mol_type = other DNA
gcgtgatcttggctcactgc

SEQ ID NO: 3043 - DNA, 20 bp, synthetic construct
  misc_feature 1..20: note = Synthetic Sequence
  source 1..20: mol_type = other DNA
ggtggcacttctctcatttg

SEQ ID NO: 3044 - DNA, 20 bp, synthetic construct
  misc_feature 1..20: note = Synthetic Sequence
  source 1..20: mol_type = other DNA
ttggagaatcatttgagtcc

SEQ ID NO: 3045 - DNA, 20 bp, synthetic construct
  misc_feature 1..20: note = Synthetic Sequence
  source 1..20: mol_type = other DNA
tgtagtctcagccacgtggg

SEQ ID NO: 3046 - DNA, 20 bp, synthetic construct
  misc_feature 1..20: note = Synthetic Sequence
  source 1..20: mol_type = other DNA
aggaccttgccctgtcactc

SEQ ID NO: 3047 - DNA, 20 bp, synthetic construct
  misc_feature 1..20: note = Synthetic Sequence
  source 1..20: mol_type = other DNA
catgatagtgaataagtctc

SEQ ID NO: 3048 - DNA, 20 bp, synthetic construct
  misc_feature 1..20: note = Synthetic Sequence
  source 1..20: mol_type = other DNA
tcccacgtggctgagactac

SEQ ID NO: 3049 - DNA, 20 bp, synthetic construct
  misc_feature 1..20: note = Synthetic Sequence
  source 1..20: mol_type = other DNA
gtctcagtggggggaaacct

SEQ ID NO: 3050 - DNA, 20 bp, synthetic construct
  misc_feature 1..20: note = Synthetic Sequence
  source 1..20: mol_type = other DNA
tcctggatacaggtcttgat

SEQ ID NO: 3051 - DNA, 20 bp, synthetic construct
  misc_feature 1..20: note = Synthetic Sequence
  source 1..20: mol_type = other DNA
cagaaaaatcacttgaacct

SEQ ID NO: 3052 - DNA, 20 bp, synthetic construct
  misc_feature 1..20: note = Synthetic Sequence
  source 1..20: mol_type = other DNA
catcccaagaggttgaggta

SEQ ID NO: 3053 - DNA, 20 bp, synthetic construct
  misc_feature 1..20: note = Synthetic Sequence
  source 1..20: mol_type = other DNA
ctttgtataaggtgtaagga

SEQ ID NO: 3054 - DNA, 20 bp, synthetic construct
  misc_feature 1..20: note = Synthetic Sequence
  source 1..20: mol_type = other DNA
agctgcaccccgaccacctt

SEQ ID NO: 3055 - DNA, 20 bp, synthetic construct
  misc_feature 1..20: note = Synthetic Sequence
  source 1..20: mol_type = other DNA
accttgaactcctgcactca

SEQ ID NO: 3056 - DNA, 20 bp, synthetic construct
  misc_feature 1..20: note = Synthetic Sequence
  source 1..20: mol_type = other DNA
gagagtggcatgaacctggg

SEQ ID NO: 3057 - DNA, 20 bp, synthetic construct
  misc_feature 1..20: note = Synthetic Sequence
  source 1..20: mol_type = other DNA
attattatactttaagcttt

SEQ ID NO: 3058 - DNA, 20 bp, synthetic construct
  misc_feature 1..20: note = Synthetic Sequence
  source 1..20: mol_type = other DNA
ctccagccttggacaacaga

SEQ ID NO: 3059 - DNA, 20 bp, synthetic construct
  misc_feature 1..20: note = Synthetic Sequence
  source 1..20: mol_type = other DNA
tttcaccaacttggccaggc

SEQ ID NO: 3060 - DNA, 20 bp, synthetic construct
  misc_feature 1..20: note = Synthetic Sequence
  source 1..20: mol_type = other DNA
caatcacggcagaaggcgaa

SEQ ID NO: 3061 - DNA, 20 bp, synthetic construct
  misc_feature 1..20: note = Synthetic Sequence
  source 1..20: mol_type = other DNA
aatcacggcagaaggcgaag

SEQ ID NO: 3062 - DNA, 20 bp, synthetic construct
  misc_feature 1..20: note = Synthetic Sequence
  source 1..20: mol_type = other DNA
ctcaaatgattctccaaact

SEQ ID NO: 3063 - DNA, 20 bp, synthetic construct
  misc_feature 1..20: note = Synthetic Sequence
  source 1..20: mol_type = other DNA
tgcccagattgccagctcac

SEQ ID NO: 3064 - DNA, 20 bp, synthetic construct
  misc_feature 1..20: note = Synthetic Sequence
  source 1..20: mol_type = other DNA
cagagatcacatgcttcaaa

SEQ ID NO: 3065 - DNA, 20 bp, synthetic construct
  misc_feature 1..20: note = Synthetic Sequence
  source 1..20: mol_type = other DNA
tccaagatcaaggtgccagc

SEQ ID NO: 3066 - DNA, 20 bp, synthetic construct
  misc_feature 1..20: note = Synthetic Sequence
  source 1..20: mol_type = other DNA
ttaatttcaccccagtcctg

SEQ ID NO: 3067 - DNA, 20 bp, synthetic construct
  misc_feature 1..20: note = Synthetic Sequence
  source 1..20: mol_type = other DNA
tttcactcttgttgccaggc

SEQ ID NO: 3068 - DNA, 20 bp, synthetic construct
  misc_feature 1..20: note = Synthetic Sequence
  source 1..20: mol_type = other DNA
aggaggtatctaaatccacc

SEQ ID NO: 3069 - DNA, 20 bp, synthetic construct
  misc_feature 1..20: note = Synthetic Sequence
  source 1..20: mol_type = other DNA
tggagggctgtgtaaagctc

SEQ ID NO: 3070 - DNA, 20 bp, synthetic construct
  misc_feature 1..20: note = Synthetic Sequence
  source 1..20: mol_type = other DNA
tcttaccatattgcccatgc

SEQ ID NO: 3071 - DNA, 20 bp, synthetic construct
  misc_feature 1..20: note = Synthetic Sequence
  source 1..20: mol_type = other DNA
gtgatgtggccacaagccca

SEQ ID NO: 3072 - DNA, 20 bp, synthetic construct
  misc_feature 1..20: note = Synthetic Sequence
  source 1..20: mol_type = other DNA
aattataggtgaataaagaa

SEQ ID NO: 3073 - DNA, 20 bp, synthetic construct
  misc_feature 1..20: note = Synthetic Sequence
  source 1..20: mol_type = other DNA
agacacagacacagaggagg

SEQ ID NO: 3074 - DNA, 20 bp, synthetic construct
  misc_feature 1..20: note = Synthetic Sequence
  source 1..20: mol_type = other DNA
gaaaggcacgtctcacatgg

SEQ ID NO: 3075 - DNA, 20 bp, synthetic construct
  misc_feature 1..20: note = Synthetic Sequence
  source 1..20: mol_type = other DNA
acctcagcgtcccgagcagc

SEQ ID NO: 3076 - DNA, 20 bp, synthetic construct
  misc_feature 1..20: note = Synthetic Sequence
  source 1..20: mol_type = other DNA
acataggtatgcacgtgcca

SEQ ID NO: 3077 - DNA, 20 bp, synthetic construct
  misc_feature 1..20: note = Synthetic Sequence
  source 1..20: mol_type = other DNA
aacaaacatcattggtcaca

SEQ ID NO: 3078 - DNA, 20 bp, synthetic construct
  misc_feature 1..20: note = Synthetic Sequence
  source 1..20: mol_type = other DNA
accagtcttcacagtggtca

SEQ ID NO: 3079 - DNA, 20 bp, synthetic construct
  misc_feature 1..20: note = Synthetic Sequence
  source 1..20: mol_type = other DNA
acagatgccatggcaatgtc

SEQ ID NO: 3080 - DNA, 20 bp, synthetic construct
  misc_feature 1..20: note = Synthetic Sequence
  source 1..20: mol_type = other DNA
ccttgaactcctgcactcaa

SEQ ID NO: 3081 - DNA, 20 bp, synthetic construct
  misc_feature 1..20: note = Synthetic Sequence
  source 1..20: mol_type = other DNA
tctaaggggtccacgtgaaa

SEQ ID NO: 3082 - DNA, 20 bp, synthetic construct
  misc_feature 1..20: note = Synthetic Sequence
  source 1..20: mol_type = other DNA
aatcataggtgcatcccaag

SEQ ID NO: 3083 - DNA, 20 bp, synthetic construct
  misc_feature 1..20: note = Synthetic Sequence
  source 1..20: mol_type = other DNA
acactcaccgtgagggtcca

SEQ ID NO: 3084 - DNA, 20 bp, synthetic construct
  misc_feature 1..20: note = Synthetic Sequence
  source 1..20: mol_type = other DNA
aaagggatgggctgaaataa

SEQ ID NO: 3085 - DNA, 20 bp, synthetic construct
  misc_feature 1..20: note = Synthetic Sequence
  source 1..20: mol_type = other DNA
aacttagaggacgggtcaat

SEQ ID NO: 3086 - DNA, 20 bp, synthetic construct
  misc_feature 1..20: note = Synthetic Sequence
  source 1..20: mol_type = other DNA
ataaataaaagaggtttaat

SEQ ID NO: 3087 - DNA, 20 bp, synthetic construct
  misc_feature 1..20: note = Synthetic Sequence
  source 1..20: mol_type = other DNA
gtccatggaccgaccgtggg

SEQ ID NO: 3088 - DNA, 20 bp, synthetic construct
  misc_feature 1..20: note = Synthetic Sequence
  source 1..20: mol_type = other DNA
tgaactccatcctgagtgac

SEQ ID NO: 3089 - DNA, 20 bp, synthetic construct
  misc_feature 1..20: note = Synthetic Sequence
  source 1..20: mol_type = other DNA
aaacaaacatcattggtcac

SEQ ID NO: 3090 - DNA, 20 bp, synthetic construct
  misc_feature 1..20: note = Synthetic Sequence
  source 1..20: mol_type = other DNA
gtaattgtgctgtgtaacat

SEQ ID NO: 3091 - DNA, 20 bp, synthetic construct
  misc_feature 1..20: note = Synthetic Sequence
  source 1..20: mol_type = other DNA
tgagacaatcgatttagccc

SEQ ID NO: 3092 - DNA, 20 bp, synthetic construct
  misc_feature 1..20: note = Synthetic Sequence
  source 1..20: mol_type = other DNA
aggtgcatcccaagaggttg

SEQ ID NO: 3093 - DNA, 20 bp, synthetic construct
  misc_feature 1..20: note = Synthetic Sequence
  source 1..20: mol_type = other DNA
taagctagtctcccaaatga

SEQ ID NO: 3094 - DNA, 20 bp, synthetic construct
  misc_feature 1..20: note = Synthetic Sequence
  source 1..20: mol_type = other DNA
tgtagggtcatggatgaagc

SEQ ID NO: 3095 - DNA, 20 bp, synthetic construct
  misc_feature 1..20: note = Synthetic Sequence
  source 1..20: mol_type = other DNA
acctgtagtctcagccacgt

SEQ ID NO: 3096 - DNA, 20 bp, synthetic construct
  misc_feature 1..20: note = Synthetic Sequence
  source 1..20: mol_type = other DNA
tggtggatttagatacctcc

SEQ ID NO: 3097 - DNA, 20 bp, synthetic construct
  misc_feature 1..20: note = Synthetic Sequence
  source 1..20: mol_type = other DNA
cagaatgtagaacactgagc

SEQ ID NO: 3098 - DNA, 20 bp, synthetic construct
  misc_feature 1..20: note = Synthetic Sequence
  source 1..20: mol_type = other DNA
tccaaggtgggtggatcacg

SEQ ID NO: 3099 - DNA, 20 bp, synthetic construct
  misc_feature 1..20: note = Synthetic Sequence
  source 1..20: mol_type = other DNA
atataggtatacacgtgcca

SEQ ID NO: 3100 - DNA, 20 bp, synthetic construct
  misc_feature 1..20: note = Synthetic Sequence
  source 1..20: mol_type = other DNA
atacatcctcctcaactgac

SEQ ID NO: 3101 - DNA, 20 bp, synthetic construct
  misc_feature 1..20: note = Synthetic Sequence
  source 1..20: mol_type = other DNA
cccttgaccactgtgaagac

SEQ ID NO: 3102 - DNA, 20 bp, synthetic construct
  misc_feature 1..20: note = Synthetic Sequence
  source 1..20: mol_type = other DNA
tctacttctgggggatggtc

SEQ ID NO: 3103 - DNA, 20 bp, synthetic construct
  misc_feature 1..20: note = Synthetic Sequence
  source 1..20: mol_type = other DNA
cccttgagtgcaggagttca

SEQ ID NO: 3104 - DNA, 20 bp, synthetic construct
  misc_feature 1..20: note = Synthetic Sequence
  source 1..20: mol_type = other DNA
aagaatagcatgggaaagac

SEQ ID NO: 3105 - DNA, 20 bp, synthetic construct
  misc_feature 1..20: note = Synthetic Sequence
  source 1..20: mol_type = other DNA
agaagaagacaagaaaatgt

SEQ ID NO: 3106 - DNA, 20 bp, synthetic construct
  misc_feature 1..20: note = Synthetic Sequence
  source 1..20: mol_type = other DNA
tgtaagcccttaaaagggcc

SEQ ID NO: 3107 - DNA, 20 bp, synthetic construct
  misc_feature 1..20: note = Synthetic Sequence
  source 1..20: mol_type = other DNA
tattcaggtacaaaaagact

SEQ ID NO: 3108 - DNA, 20 bp, synthetic construct
  misc_feature 1..20: note = Synthetic Sequence
  source 1..20: mol_type = other DNA
gagaattgcttgaatctgag

SEQ ID NO: 3109 - DNA, 20 bp, synthetic construct
  misc_feature 1..20: note = Synthetic Sequence
  source 1..20: mol_type = other DNA
aagaattgtgtgaacccagg

SEQ ID NO: 3110 - DNA, 20 bp, synthetic construct
  misc_feature 1..20: note = Synthetic Sequence
  source 1..20: mol_type = other DNA
tgagagcaagagagggcgtg

SEQ ID NO: 3111 - DNA, 20 bp, synthetic construct
  misc_feature 1..20: note = Synthetic Sequence
  source 1..20: mol_type = other DNA
aaaatatcacaaggcaaatg

SEQ ID NO: 3112 - DNA, 20 bp, synthetic construct
  misc_feature 1..20: note = Synthetic Sequence
  source 1..20: mol_type = other DNA
gggagacatcacacattggt

SEQ ID NO: 3113 - DNA, 20 bp, synthetic construct
  misc_feature 1..20: note = Synthetic Sequence
  source 1..20: mol_type = other DNA
tggattagttggggaagggc

SEQ ID NO: 3114 - DNA, 20 bp, synthetic construct
  misc_feature 1..20: note = Synthetic Sequence
  source 1..20: mol_type = other DNA
agctaaagctaaagcggcaa

SEQ ID NO: 3115 - DNA, 20 bp, synthetic construct
  misc_feature 1..20: note = Synthetic Sequence
  source 1..20: mol_type = other DNA
gatgaagacatacccaagac

SEQ ID NO: 3116 - DNA, 20 bp, synthetic construct
  misc_feature 1..20: note = Synthetic Sequence
  source 1..20: mol_type = other DNA
gattaggttctagtcctcta

SEQ ID NO: 3117 - DNA, 20 bp, synthetic construct
  misc_feature 1..20: note = Synthetic Sequence
  source 1..20: mol_type = other DNA
tgggaggctggatattatcc

SEQ ID NO: 3118 - DNA, 20 bp, synthetic construct
  misc_feature 1..20: note = Synthetic Sequence
  source 1..20: mol_type = other DNA
caggagagtggcatgaacct

SEQ ID NO: 3119 - DNA, 20 bp, synthetic construct
  misc_feature 1..20: note = Synthetic Sequence
  source 1..20: mol_type = other DNA
gggagagaagcttccagtta

SEQ ID NO: 3120 - DNA, 20 bp, synthetic construct
  misc_feature 1..20: note = Synthetic Sequence
  source 1..20: mol_type = other DNA
ggcttcatccctgggatgcg

SEQ ID NO: 3121 - DNA, 20 bp, synthetic construct
  misc_feature 1..20: note = Synthetic Sequence
  source 1..20: mol_type = other DNA
tcaaagcagtccacccacct

SEQ ID NO: 3122 - DNA, 20 bp, synthetic construct
  misc_feature 1..20: note = Synthetic Sequence
  source 1..20: mol_type = other DNA
aaacaaccatcagagtgaac

SEQ ID NO: 3123 - DNA, 20 bp, synthetic construct
  misc_feature 1..20: note = Synthetic Sequence
  source 1..20: mol_type = other DNA
atgattcagttacctccccc

SEQ ID NO: 3124 - DNA, 20 bp, synthetic construct
  misc_feature 1..20: note = Synthetic Sequence
  source 1..20: mol_type = other DNA
aaatacctaatgtagatgaa

SEQ ID NO: 3125 - DNA, 20 bp, synthetic construct
  misc_feature 1..20: note = Synthetic Sequence
  source 1..20: mol_type = other DNA
cacgagaatagcttgaacct

SEQ ID NO: 3126 - DNA, 20 bp, synthetic construct
  misc_feature 1..20: note = Synthetic Sequence
  source 1..20: mol_type = other DNA
ggcaggcctaagccacctaa

SEQ ID NO: 3127 - DNA, 20 bp, synthetic construct
  misc_feature 1..20: note = Synthetic Sequence
  source 1..20: mol_type = other DNA
gttatgggggcaagggaaac

SEQ ID NO: 3128 - DNA, 20 bp, synthetic construct
  misc_feature 1..20: note = Synthetic Sequence
  source 1..20: mol_type = other DNA
ggggaggtaactgaatcatg

SEQ ID NO: 3129 - DNA, 20 bp, synthetic construct
  misc_feature 1..20: note = Synthetic Sequence
  source 1..20: mol_type = other DNA
caatacccacaacagttatg

SEQ ID NO: 3130 - DNA, 20 bp, synthetic construct
  misc_feature 1..20: note = Synthetic Sequence
  source 1..20: mol_type = other DNA
aatgtgaatgacgagttaat

SEQ ID NO: 3131 - DNA, 20 bp, synthetic construct
  misc_feature 1..20: note = Synthetic Sequence
  source 1..20: mol_type = other DNA
ggcagggtgatcacgaggtc

SEQ ID NO: 3132 - DNA, 20 bp, synthetic construct
  misc_feature 1..20: note = Synthetic Sequence
  source 1..20: mol_type = other DNA
actgggaaggctgacatggt

SEQ ID NO: 3133 - DNA, 20 bp, synthetic construct
  misc_feature 1..20: note = Synthetic Sequence
  source 1..20: mol_type = other DNA
aagatcttgctatattgccc

SEQ ID NO: 3134 - DNA, 20 bp, synthetic construct
  misc_feature 1..20: note = Synthetic Sequence
  source 1..20: mol_type = other DNA
gaatccagggctcgtggctc

SEQ ID NO: 3135 - DNA, 20 bp, synthetic construct
  misc_feature 1..20: note = Synthetic Sequence
  source 1..20: mol_type = other DNA
cggatgactgcgggcaggcc

SEQ ID NO: 3136 - DNA, 20 bp, synthetic construct
  misc_feature 1..20: note = Synthetic Sequence
  source 1..20: mol_type = other DNA
ctaaatccaccaggagccat

SEQ ID NO: 3137 - DNA, 20 bp, synthetic construct
  misc_feature 1..20: note = Synthetic Sequence
  source 1..20: mol_type = other DNA
gccgaggcagggtgatcacg

SEQ ID NO: 3138 - DNA, 20 bp, synthetic construct
  misc_feature 1..20: note = Synthetic Sequence
  source 1..20: mol_type = other DNA
actctacaacctcgatggac

SEQ ID NO: 3139 - DNA, 20 bp, synthetic construct
  misc_feature 1..20: note = Synthetic Sequence
  source 1..20: mol_type = other DNA
tcaatacccacaacagttat

SEQ ID NO: 3140 - DNA, 20 bp, synthetic construct
  misc_feature 1..20: note = Synthetic Sequence
  source 1..20: mol_type = other DNA
aatacaaaactagctgggcg

SEQ ID NO: 3141 - DNA, 20 bp, synthetic construct
  misc_feature 1..20: note = Synthetic Sequence
  source 1..20: mol_type = other DNA
atgtcagccttcccagtagc

SEQ ID NO: 3142 - DNA, 20 bp, synthetic construct
  misc_feature 1..20: note = Synthetic Sequence
  source 1..20: mol_type = other DNA
caggtgaccgccaccacgcc

SEQ ID NO: 3143 - DNA, 20 bp, synthetic construct
  misc_feature 1..20: note = Synthetic Sequence
  source 1..20: mol_type = other DNA
cttaggtgatccaccagcat

SEQ ID NO: 3144 - DNA, 20 bp, synthetic construct
  misc_feature 1..20: note = Synthetic Sequence
  source 1..20: mol_type = other DNA
attagctaggcgtggtggct

SEQ ID NO: 3145 - DNA, 20 bp, synthetic construct
  misc_feature 1..20: note = Synthetic Sequence
  source 1..20: mol_type = other DNA
tggattctatccaagccacg

SEQ ID NO: 3146 - DNA, 20 bp, synthetic construct
  misc_feature 1..20: note = Synthetic Sequence
  source 1..20: mol_type = other DNA
tctgattgcctcatttggag

SEQ ID NO: 3147 - DNA, 20 bp, synthetic construct
  misc_feature 1..20: note = Synthetic Sequence
  source 1..20: mol_type = other DNA
ataagctagtctcccaaatg

SEQ ID NO: 3148 - DNA, 20 bp, synthetic construct
  misc_feature 1..20: note = Synthetic Sequence
  source 1..20: mol_type = other DNA
tcactcaggatggagttcag

SEQ ID NO: 3149 - DNA, 20 bp, synthetic construct
  misc_feature 1..20: note = Synthetic Sequence
  source 1..20: mol_type = other DNA
ggggaaaaccatctcccttc

SEQ ID NO: 3150 - DNA, 20 bp, synthetic construct
  misc_feature 1..20: note = Synthetic Sequence
  source 1..20: mol_type = other DNA
atggtaggattgcttgagcc

SEQ ID NO: 3151 - DNA, 20 bp, synthetic construct
  misc_feature 1..20: note = Synthetic Sequence
  source 1..20: mol_type = other DNA
gggggaggtaactgaatcat

SEQ ID NO: 3152 - DNA, 20 bp, synthetic construct
  misc_feature 1..20: note = Synthetic Sequence
  source 1..20: mol_type = other DNA
tgtcagccttcccagtagct

SEQ ID NO: 3153 - DNA, 20 bp, synthetic construct
  misc_feature 1..20: note = Synthetic Sequence
  source 1..20: mol_type = other DNA
aggagtcagcaaagggagat

SEQ ID NO: 3154 - DNA, 20 bp, synthetic construct
  misc_feature 1..20: note = Synthetic Sequence
  source 1..20: mol_type = other DNA
cgagatcagcctggccagca

SEQ ID NO: 3155 - DNA, 20 bp, synthetic construct
  misc_feature 1..20: note = Synthetic Sequence
  source 1..20: mol_type = other DNA
acataggtatacacgtacca

SEQ ID NO: 3156 - DNA, 20 bp, synthetic construct
  misc_feature 1..20: note = Synthetic Sequence
  source 1..20: mol_type = other DNA
atgagccaccacgccctgct

SEQ ID NO: 3157 - DNA, 20 bp, synthetic construct
  misc_feature 1..20: note = Synthetic Sequence
  source 1..20: mol_type = other DNA
gtcaagtgatccacccgcct

SEQ ID NO: 3158 - DNA, 20 bp, synthetic construct
  misc_feature 1..20: note = Synthetic Sequence
  source 1..20: mol_type = other DNA
aggaggctgaggcaggagat

SEQ ID NO: 3159 - DNA, 20 bp, synthetic construct
  misc_feature 1..20: note = Synthetic Sequence
  source 1..20: mol_type = other DNA
acaatcacggcagaaggcga

SEQ ID NO: 3160 - DNA, 20 bp, synthetic construct
  misc_feature 1..20: note = Synthetic Sequence
  source 1..20: mol_type = other DNA
tcacacatgttccctcattt

SEQ ID NO: 3161 - DNA, 20 bp, synthetic construct
  misc_feature 1..20: note = Synthetic Sequence
  source 1..20: mol_type = other DNA
tcaaaccaaaaaacatacaa

SEQ ID NO: 3162 - DNA, 20 bp, synthetic construct
  misc_feature 1..20: note = Synthetic Sequence
  source 1..20: mol_type = other DNA
aagggatgggctgaaataaa

SEQ ID NO: 3163 - DNA, 20 bp, synthetic construct
  misc_feature 1..20: note = Synthetic Sequence
  source 1..20: mol_type = other DNA
ccacaacagttatgggggca

SEQ ID NO: 3164 - DNA, 20 bp, synthetic construct
  misc_feature 1..20: note = Synthetic Sequence
  source 1..20: mol_type = other DNA
ttgatggcttccttgctttc

SEQ ID NO: 3165 - DNA, 20 bp, synthetic construct
  misc_feature 1..20: note = Synthetic Sequence
  source 1..20: mol_type = other DNA
cataagaattgtgtgaaccc

SEQ ID NO: 3166 - DNA, 20 bp, synthetic construct
  misc_feature 1..20: note = Synthetic Sequence
  source 1..20: mol_type = other DNA
gctaaggtgggtggatcatg

SEQ ID NO: 3167 - DNA, 20 bp, synthetic construct
  misc_feature 1..20: note = Synthetic Sequence
  source 1..20: mol_type = other DNA
aaggttagtaatggtatgtg

SEQ ID NO: 3168 - DNA, 20 bp, synthetic construct
  misc_feature 1..20: note = Synthetic Sequence
  source 1..20: mol_type = other DNA
atgggattgcattcctgatt

SEQ ID NO: 3169 - DNA, 20 bp, synthetic construct
  misc_feature 1..20: note = Synthetic Sequence
  source 1..20: mol_type = other DNA
ggtgtcagtgtgcccctgtt

SEQ ID NO: 3170 - DNA, 20 bp, synthetic construct
  misc_feature 1..20: note = Synthetic Sequence
  source 1..20: mol_type = other DNA
gtcacacatgttccctcatt

SEQ ID NO: 3171 - DNA, 20 bp, synthetic construct
  misc_feature 1..20: note = Synthetic Sequence
  source 1..20: mol_type = other DNA
aatcacttgaacctggggga

SEQ ID NO: 3172 - DNA, 20 bp, synthetic construct
  misc_feature 1..20: note = Synthetic Sequence
  source 1..20: mol_type = other DNA
gggtggactgctttgagctc

SEQ ID NO: 3173 - DNA, 20 bp, synthetic construct
  misc_feature 1..20: note = Synthetic Sequence
  source 1..20: mol_type = other DNA
caggagttcgcaaccagcct

SEQ ID NO: 3174 - DNA, 20 bp, synthetic construct
  misc_feature 1..20: note = Synthetic Sequence
  source 1..20: mol_type = other DNA
tggccaggggctgacggatc

SEQ ID NO: 3175 - DNA, 20 bp, synthetic construct
  misc_feature 1..20: note = Synthetic Sequence
  source 1..20: mol_type = other DNA
gctggacttcctgggtcaat

SEQ ID NO: 3176 - DNA, 20 bp, synthetic construct
  misc_feature 1..20: note = Synthetic Sequence
  source 1..20: mol_type = other DNA
attaactcgtcattcacatt

SEQ ID NO: 3177 - DNA, 20 bp, synthetic construct
  misc_feature 1..20: note = Synthetic Sequence
  source 1..20: mol_type = other DNA
ctggacttcctgggtcaata

SEQ ID NO: 3178 - DNA, 20 bp, synthetic construct
  misc_feature 1..20: note = Synthetic Sequence
  source 1..20: mol_type = other DNA
tcacatctgtataatagagg

SEQ ID NO: 3179 - DNA, 20 bp, synthetic construct
  misc_feature 1..20: note = Synthetic Sequence
  source 1..20: mol_type = other DNA
gtcagtgtgcccctgttggg

SEQ ID NO: 3180 - DNA, 20 bp, synthetic construct
  misc_feature 1..20: note = Synthetic Sequence
  source 1..20: mol_type = other DNA
ttctacattctgcagttgtc

SEQ ID NO: 3181 - DNA, 20 bp, synthetic construct
  misc_feature 1..20: note = Synthetic Sequence
  source 1..20: mol_type = other DNA
gtaaagatgactctgaagaa

SEQ ID NO: 3182 - DNA, 20 bp, synthetic construct
  misc_feature 1..20: note = Synthetic Sequence
  source 1..20: mol_type = other DNA
ttccaggacctttgactgaa

SEQ ID NO: 3183 - DNA, 20 bp, synthetic construct
  misc_feature 1..20: note = Synthetic Sequence
  source 1..20: mol_type = other DNA
cttcatccatgaccctacaa

SEQ ID NO: 3184 - DNA, 20 bp, synthetic construct
  misc_feature 1..20: note = Synthetic Sequence
  source 1..20: mol_type = other DNA
gtggccaggggctgacggat

SEQ ID NO: 3185 - DNA, 20 bp, synthetic construct
  misc_feature 1..20: note = Synthetic Sequence
  source 1..20: mol_type = other DNA
gacctcaattgcagcctgta

SEQ ID NO: 3186 - DNA, 20 bp, synthetic construct
  misc_feature 1..20: note = Synthetic Sequence
  source 1..20: mol_type = other DNA
tgattaggttctagtcctct

SEQ ID NO: 3187 - DNA, 20 bp, synthetic construct
  misc_feature 1..20: note = Synthetic Sequence
  source 1..20: mol_type = other DNA
gagacggggtttcgccaagt

SEQ ID NO: 3188 - DNA, 20 bp, synthetic construct
  misc_feature 1..20: note = Synthetic Sequence
  source 1..20: mol_type = other DNA
gtgtcagtgtgcccctgttg

SEQ ID NO: 3189 - DNA, 20 bp, synthetic construct
  misc_feature 1..20: note = Synthetic Sequence
  source 1..20: mol_type = other DNA
tggcatgaacccaggaggcg

SEQ ID NO: 3190 - DNA, 20 bp, synthetic construct
  misc_feature 1..20: note = Synthetic Sequence
  source 1..20: mol_type = other DNA
gggggtagggggctagggga

SEQ ID NO: 3191 - DNA, 20 bp, synthetic construct
  misc_feature 1..20: note = Synthetic Sequence
  source 1..20: mol_type = other DNA
gttcaaggtacaggtcaaaa

SEQ ID NO: 3192 - DNA, 20 bp, synthetic construct
  misc_feature 1..20: note = Synthetic Sequence
  source 1..20: mol_type = other DNA
tcgatcacgaccctctcacg

SEQ ID NO: 3193 - DNA, 20 bp, synthetic construct
  misc_feature 1..20: note = Synthetic Sequence
  source 1..20: mol_type = other DNA
gtgagagaagcttccagtta

SEQ ID NO: 3194 - DNA, 20 bp, synthetic construct
  misc_feature 1..20: note = Synthetic Sequence
  source 1..20: mol_type = other DNA
ctgaaaaaggagtcagcaaa

SEQ ID NO: 3195 - DNA, 20 bp, synthetic construct
  misc_feature 1..20: note = Synthetic Sequence
  source 1..20: mol_type = other DNA
agctgaataatgagaacaca

SEQ ID NO: 3196 - DNA, 20 bp, synthetic construct
  misc_feature 1..20: note = Synthetic Sequence
  source 1..20: mol_type = other DNA
agtcatctttactgctgcag

SEQ ID NO: 3197 - DNA, 20 bp, synthetic construct
  misc_feature 1..20: note = Synthetic Sequence
  source 1..20: mol_type = other DNA
tcaatatactgcaccataca

SEQ ID NO: 3198 - DNA, 20 bp, synthetic construct
  misc_feature 1..20: note = Synthetic Sequence
  source 1..20: mol_type = other DNA
gactagaacctaatcagtta

SEQ ID NO: 3199 - DNA, 20 bp, synthetic construct
  misc_feature 1..20: note = Synthetic Sequence
  source 1..20: mol_type = other DNA
gcccaggtgggcggatcaca

SEQ ID NO: 3200 - DNA, 20 bp, synthetic construct
  misc_feature 1..20: note = Synthetic Sequence
  source 1..20: mol_type = other DNA
taggtatgcacgtgccatgg

SEQ ID NO: 3201 - DNA, 20 bp, synthetic construct
  misc_feature 1..20: note = Synthetic Sequence
  source 1..20: mol_type = other DNA
aaactgacaatcacggcaga

SEQ ID NO: 3202 - DNA, 20 bp, synthetic construct
  misc_feature 1..20: note = Synthetic Sequence
  source 1..20: mol_type = other DNA
attcagaagtctttcatggt

SEQ ID NO: 3203 - DNA, 20 bp, synthetic construct
  misc_feature 1..20: note = Synthetic Sequence
  source 1..20: mol_type = other DNA
tgtcagtgtgcccctgttgg

SEQ ID NO: 3204 - DNA, 20 bp, synthetic construct
  misc_feature 1..20: note = Synthetic Sequence
  source 1..20: mol_type = other DNA
cagctgaaggaggggtctgt

SEQ ID NO: 3205 - DNA, 20 bp, synthetic construct
  misc_feature 1..20: note = Synthetic Sequence
  source 1..20: mol_type = other DNA
tctgaaaaaggagtcagcaa

SEQ ID NO: 3206 - DNA, 20 bp, synthetic construct
  misc_feature 1..20: note = Synthetic Sequence
  source 1..20: mol_type = other DNA
ggccaggggctgacggatcg

SEQ ID NO: 3207 - DNA, 20 bp, synthetic construct
  misc_feature 1..20: note = Synthetic Sequence
  source 1..20: mol_type = other DNA
agtttcaaactcctgacctc

SEQ ID NO: 3208 - DNA, 20 bp, synthetic construct
  misc_feature 1..20: note = Synthetic Sequence
  source 1..20: mol_type = other DNA
taacataggacatgagcaat

SEQ ID NO: 3209 - DNA, 20 bp, synthetic construct
  misc_feature 1..20: note = Synthetic Sequence
  source 1..20: mol_type = other DNA
ctgacggatcggggagaggc

SEQ ID NO: 3210 - DNA, 20 bp, synthetic construct
  misc_feature 1..20: note = Synthetic Sequence
  source 1..20: mol_type = other DNA
acagtacagtgacatgatca

SEQ ID NO: 3211 - DNA, 20 bp, synthetic construct
  misc_feature 1..20: note = Synthetic Sequence
  source 1..20: mol_type = other DNA
aggtcagctcagacacatgg

SEQ ID NO: 3212 - DNA, 20 bp, synthetic construct
  misc_feature 1..20: note = Synthetic Sequence
  source 1..20: mol_type = other DNA
agggggaggtaactgaatca

SEQ ID NO: 3213 - DNA, 20 bp, synthetic construct
  misc_feature 1..20: note = Synthetic Sequence
  source 1..20: mol_type = other DNA
atataataatagacacaggc

SEQ ID NO: 3214 - DNA, 20 bp, synthetic construct
  misc_feature 1..20: note = Synthetic Sequence
  source 1..20: mol_type = other DNA
ggaagccatcaaagtccaac

SEQ ID NO: 3215 - DNA, 20 bp, synthetic construct
  misc_feature 1..20: note = Synthetic Sequence
  source 1..20: mol_type = other DNA
cagaggcaaggccctgaggt

SEQ ID NO: 3216 - DNA, 20 bp, synthetic construct
  misc_feature 1..20: note = Synthetic Sequence
  source 1..20: mol_type = other DNA
atattagctttaaatgtaaa

SEQ ID NO: 3217 - DNA, 20 bp, synthetic construct
  misc_feature 1..20: note = Synthetic Sequence
  source 1..20: mol_type = other DNA
taatgtagatgaagggttga

SEQ ID NO: 3218 - DNA, 20 bp, synthetic construct
  misc_feature 1..20: note = Synthetic Sequence
  source 1..20: mol_type = other DNA
gaagcagtctgggtggccag

SEQ ID NO: 3219 - DNA, 20 bp, synthetic construct
  misc_feature 1..20: note = Synthetic Sequence
  source 1..20: mol_type = other DNA
taggagttcacgctttagtt

SEQ ID NO: 3220 - DNA, 20 bp, synthetic construct
  misc_feature 1..20: note = Synthetic Sequence
  source 1..20: mol_type = other DNA
ggagacttacagttcaatat

SEQ ID NO: 3221 - DNA, 20 bp, synthetic construct
  misc_feature 1..20: note = Synthetic Sequence
  source 1..20: mol_type = other DNA
ctaaagcgtgaactcctagc

SEQ ID NO: 3222 - DNA, 20 bp, synthetic construct
  misc_feature 1..20: note = Synthetic Sequence
  source 1..20: mol_type = other DNA
tataataatagacacaggca

SEQ ID NO: 3223 - DNA, 20 bp, synthetic construct
  misc_feature 1..20: note = Synthetic Sequence
  source 1..20: mol_type = other DNA
aaagtaaaggaacaaaagaa

SEQ ID NO: 3224 - DNA, 20 bp, synthetic construct
  misc_feature 1..20: note = Synthetic Sequence
  source 1..20: mol_type = other DNA
atttatgttcttctctaaag

SEQ ID NO: 3225 - DNA, 20 bp, synthetic construct
  misc_feature 1..20: note = Synthetic Sequence
  source 1..20: mol_type = other DNA
ggactgagaagcagtctggg

SEQ ID NO: 3226 - DNA, 20 bp, synthetic construct
  misc_feature 1..20: note = Synthetic Sequence
  source 1..20: mol_type = other DNA
gtggatggattagttgggga

SEQ ID NO: 3227 - DNA, 20 bp, synthetic construct
  misc_feature 1..20: note = Synthetic Sequence
  source 1..20: mol_type = other DNA
agccagtttatccatctggg

SEQ ID NO: 3228 - DNA, 20 bp, synthetic construct
  misc_feature 1..20: note = Synthetic Sequence
  source 1..20: mol_type = other DNA
gcattcaaagcagtgtgtac

SEQ ID NO: 3229 - DNA, 20 bp, synthetic construct
  misc_feature 1..20: note = Synthetic Sequence
  source 1..20: mol_type = other DNA
aggagttcacgctttagttg

SEQ ID NO: 3230 - DNA, 20 bp, synthetic construct
  misc_feature 1..20: note = Synthetic Sequence
  source 1..20: mol_type = other DNA
catgagatttgggagggacc

SEQ ID NO: 3231 - DNA, 20 bp, synthetic construct
  misc_feature 1..20: note = Synthetic Sequence
  source 1..20: mol_type = other DNA
cagcaagataacatgctact

SEQ ID NO: 3232 - DNA, 20 bp, synthetic construct
  misc_feature 1..20: note = Synthetic Sequence
  source 1..20: mol_type = other DNA
atgaatataataatagacac

SEQ ID NO: 3233 - DNA, 20 bp, synthetic construct
  misc_feature 1..20: note = Synthetic Sequence
  source 1..20: mol_type = other DNA
tacaatttgaatgaactcca

SEQ ID NO: 3234 - DNA, 20 bp, synthetic construct
  misc_feature 1..20: note = Synthetic Sequence
  source 1..20: mol_type = other DNA
gccagttcatttcctattac

SEQ ID NO: 3235 - DNA, 20 bp, synthetic construct
  misc_feature 1..20: note = Synthetic Sequence
  source 1..20: mol_type = other DNA
tgggtactggttaagaattc

SEQ ID NO: 3236 - DNA, 20 bp, synthetic construct
  misc_feature 1..20: note = Synthetic Sequence
  source 1..20: mol_type = other DNA
accagtaataggaaatgaac

SEQ ID NO: 3237 - DNA, 20 bp, synthetic construct
  misc_feature 1..20: note = Synthetic Sequence
  source 1..20: mol_type = other DNA
tgcaggtggggctcactggg

SEQ ID NO: 3238 - DNA, 20 bp, synthetic construct
  misc_feature 1..20: note = Synthetic Sequence
  source 1..20: mol_type = other DNA
tgggaggattacctgaggtc

SEQ ID NO: 3239 - DNA, 20 bp, synthetic construct
  misc_feature 1..20: note = Synthetic Sequence
  source 1..20: mol_type = other DNA
gggttaacacctgttgaagg

SEQ ID NO: 3240 - DNA, 20 bp, synthetic construct
  misc_feature 1..20: note = Synthetic Sequence
  source 1..20: mol_type = other DNA
tttaagcgatcctcccacct

SEQ ID NO: 3241 - DNA, 20 bp, synthetic construct
  misc_feature 1..20: note = Synthetic Sequence
  source 1..20: mol_type = other DNA
ggccaccatctttgctgttt

SEQ ID NO: 3242 - DNA, 20 bp, synthetic construct
  misc_feature 1..20: note = Synthetic Sequence
  source 1..20: mol_type = other DNA
tactagcatcaacaccatcc

SEQ ID NO: 3243 - DNA, 20 bp, synthetic construct
  misc_feature 1..20: note = Synthetic Sequence
  source 1..20: mol_type = other DNA
caggagaatcgcctgaacca

SEQ ID NO: 3244 - DNA, 20 bp, synthetic construct
  misc_feature 1..20: note = Synthetic Sequence
  source 1..20: mol_type = other DNA
cctcagcatcagtcttgaca

SEQ ID NO: 3245 - DNA, 20 bp, synthetic construct
  misc_feature 1..20: note = Synthetic Sequence
  source 1..20: mol_type = other DNA
aggagacttacagttcaata

SEQ ID NO: 3246 - DNA, 20 bp, synthetic construct
  misc_feature 1..20: note = Synthetic Sequence
  source 1..20: mol_type = other DNA
tggatggattagttggggaa

SEQ ID NO: 3247 - DNA, 20 bp, synthetic construct
  misc_feature 1..20: note = Synthetic Sequence
  source 1..20: mol_type = other DNA
aatgtagatgaagggttgat

SEQ ID NO: 3248 - DNA, 20 bp, synthetic construct
  misc_feature 1..20: note = Synthetic Sequence
  source 1..20: mol_type = other DNA
ttggcatggatgtggtgatc

SEQ ID NO: 3249 - DNA, 20 bp, synthetic construct
  misc_feature 1..20: note = Synthetic Sequence
  source 1..20: mol_type = other DNA
gggacctcagtatgttgcca

SEQ ID NO: 3250 - DNA, 20 bp, synthetic construct
  misc_feature 1..20: note = Synthetic Sequence
  source 1..20: mol_type = other DNA
gggccaccctggagacttgg

SEQ ID NO: 3251 - DNA, 20 bp, synthetic construct
  misc_feature 1..20: note = Synthetic Sequence
  source 1..20: mol_type = other DNA
ccaaggacctgcactggcac

SEQ ID NO: 3252 - DNA, 20 bp, synthetic construct
  misc_feature 1..20: note = Synthetic Sequence
  source 1..20: mol_type = other DNA
cgcttgaaactggaaggtgg

SEQ ID NO: 3253 - DNA, 20 bp, synthetic construct
  misc_feature 1..20: note = Synthetic Sequence
  source 1..20: mol_type = other DNA
cataggacatgagcaattgg

SEQ ID NO: 3254 - DNA, 20 bp, synthetic construct
  misc_feature 1..20: note = Synthetic Sequence
  source 1..20: mol_type = other DNA
caaaactcagaaggtacaga

SEQ ID NO: 3255 - DNA, 20 bp, synthetic construct
  misc_feature 1..20: note = Synthetic Sequence
  source 1..20: mol_type = other DNA
aaggaaggggtttattcggc

SEQ ID NO: 3256 - DNA, 20 bp, synthetic construct
  misc_feature 1..20: note = Synthetic Sequence
  source 1..20: mol_type = other DNA
cctatatggtctaaaagggg

SEQ ID NO: 3257 - DNA, 20 bp, synthetic construct
  misc_feature 1..20: note = Synthetic Sequence
  source 1..20: mol_type = other DNA
agtgcaatgggaagctcttc

SEQ ID NO: 3258 - DNA, 20 bp, synthetic construct
  misc_feature 1..20: note = Synthetic Sequence
  source 1..20: mol_type = other DNA
agaagcagtctgggtggcca

SEQ ID NO: 3259 - DNA, 20 bp, synthetic construct
  misc_feature 1..20: note = Synthetic Sequence
  source 1..20: mol_type = other DNA
tttgagtgtgaaatatctca

SEQ ID NO: 3260 - DNA, 20 bp, synthetic construct
  misc_feature 1..20: note = Synthetic Sequence
  source 1..20: mol_type = other DNA
cttagaaataaatttaacca

SEQ ID NO: 3261 - DNA, 20 bp, synthetic construct
  misc_feature 1..20: note = Synthetic Sequence
  source 1..20: mol_type = other DNA
cggaagctgaggcaggagaa

SEQ ID NO: 3262 - DNA, 20 bp, synthetic construct
  misc_feature 1..20: note = Synthetic Sequence
  source 1..20: mol_type = other DNA
ccaccaggttgcctaaggag

SEQ ID NO: 3263 - DNA, 20 bp, synthetic construct
  misc_feature 1..20: note = Synthetic Sequence
  source 1..20: mol_type = other DNA
gactaaaacaccaaaagaaa

SEQ ID NO: 3264 - DNA, 20 bp, synthetic construct
  misc_feature 1..20: note = Synthetic Sequence
  source 1..20: mol_type = other DNA
cgtgaactcctagcagggcg

SEQ ID NO: 3265 - DNA, 20 bp, synthetic construct
  misc_feature 1..20: note = Synthetic Sequence
  source 1..20: mol_type = other DNA
tgcttgaactcgggagatgg

SEQ ID NO: 3266 - DNA, 20 bp, synthetic construct
  misc_feature 1..20: note = Synthetic Sequence
  source 1..20: mol_type = other DNA
gtgatcctgttggactttga

SEQ ID NO: 3267 - DNA, 20 bp, synthetic construct
  misc_feature 1..20: note = Synthetic Sequence
  source 1..20: mol_type = other DNA
gagaagcagtctgggtggcc

SEQ ID NO: 3268 - DNA, 20 bp, synthetic construct
  misc_feature 1..20: note = Synthetic Sequence
  source 1..20: mol_type = other DNA
aaaactcagaaggtacagaa

SEQ ID NO: 3269 - DNA, 20 bp, synthetic construct
  misc_feature 1..20: note = Synthetic Sequence
  source 1..20: mol_type = other DNA
tcctactttggcggcacttg

SEQ ID NO: 3270 - DNA, 20 bp, synthetic construct
  misc_feature 1..20: note = Synthetic Sequence
  source 1..20: mol_type = other DNA
taaagcgtgaactcctagca

SEQ ID NO: 3271 - DNA, 20 bp, synthetic construct
  misc_feature 1..20: note = Synthetic Sequence
  source 1..20: mol_type = other DNA
ccccgcagggatgctccaca

SEQ ID NO: 3272 - DNA, 20 bp, synthetic construct
  misc_feature 1..20: note = Synthetic Sequence
  source 1..20: mol_type = other DNA
ggtcgcaagatgctcagtgg

SEQ ID NO: 3273 - DNA, 20 bp, synthetic construct
  misc_feature 1..20: note = Synthetic Sequence
  source 1..20: mol_type = other DNA
aggatttcactatgttggtc

SEQ ID NO: 3274 - DNA, 20 bp, synthetic construct
  misc_feature 1..20: note = Synthetic Sequence
  source 1..20: mol_type = other DNA
tgatcagttcctatatttct

SEQ ID NO: 3275 - DNA, 20 bp, synthetic construct
  misc_feature 1..20: note = Synthetic Sequence
  source 1..20: mol_type = other DNA
ctgagccctgaacaaagaca

SEQ ID NO: 3276 - DNA, 20 bp, synthetic construct
  misc_feature 1..20: note = Synthetic Sequence
  source 1..20: mol_type = other DNA
ctattactggttcattgtga

SEQ ID NO: 3277 - DNA, 20 bp, synthetic construct
  misc_feature 1..20: note = Synthetic Sequence
  source 1..20: mol_type = other DNA
aagtggaggccgcagaggca

SEQ ID NO: 3278 - DNA, 20 bp, synthetic construct
  misc_feature 1..20: note = Synthetic Sequence
  source 1..20: mol_type = other DNA
cacaacagttatgggggcaa

SEQ ID NO: 3279 - DNA, 20 bp, synthetic construct
  misc_feature 1..20: note = Synthetic Sequence
  source 1..20: mol_type = other DNA
tcctagcagccagttcatga

SEQ ID NO: 3280 - DNA, 20 bp, synthetic construct
  misc_feature 1..20: note = Synthetic Sequence
  source 1..20: mol_type = other DNA
gactcacatttccacatggc

SEQ ID NO: 3281 - DNA, 20 bp, synthetic construct
  misc_feature 1..20: note = Synthetic Sequence
  source 1..20: mol_type = other DNA
cctgcaggatcctccccact

SEQ ID NO: 3282 - DNA, 20 bp, synthetic construct
  misc_feature 1..20: note = Synthetic Sequence
  source 1..20: mol_type = other DNA
actgcaaaacatcattatta

SEQ ID NO: 3283 - DNA, 20 bp, synthetic construct
  misc_feature 1..20: note = Synthetic Sequence
  source 1..20: mol_type = other DNA
ttcctagcagccagttcatg

SEQ ID NO: 3284 - DNA, 20 bp, synthetic construct
  misc_feature 1..20: note = Synthetic Sequence
  source 1..20: mol_type = other DNA
ggggagaggctgggtgcata

SEQ ID NO: 3285 - DNA, 20 bp, synthetic construct
  misc_feature 1..20: note = Synthetic Sequence
  source 1..20: mol_type = other DNA
ctgcaaaacatcattattag

SEQ ID NO: 3286 - DNA, 20 bp, synthetic construct
  misc_feature 1..20: note = Synthetic Sequence
  source 1..20: mol_type = other DNA
ctaggagttcacgctttagt

SEQ ID NO: 3287 - DNA, 20 bp, synthetic construct
  misc_feature 1..20: note = Synthetic Sequence
  source 1..20: mol_type = other DNA
tacaggaagcatggctaggg

SEQ ID NO: 3288 - DNA, 20 bp, synthetic construct
  misc_feature 1..20: note = Synthetic Sequence
  source 1..20: mol_type = other DNA
tccaaagaaataaatttatt

SEQ ID NO: 3289 - DNA, 20 bp, synthetic construct
  misc_feature 1..20: note = Synthetic Sequence
  source 1..20: mol_type = other DNA
aacaccctgtgtctagctca

SEQ ID NO: 3290 - DNA, 20 bp, synthetic construct
  misc_feature 1..20: note = Synthetic Sequence
  source 1..20: mol_type = other DNA
caccacccagatggataaac

SEQ ID NO: 3291 - DNA, 20 bp, synthetic construct
  misc_feature 1..20: note = Synthetic Sequence
  source 1..20: mol_type = other DNA
ccatgaaatgctaaatctag

SEQ ID NO: 3292 - DNA, 20 bp, synthetic construct
  misc_feature 1..20: note = Synthetic Sequence
  source 1..20: mol_type = other DNA
catcaatatggtgacctcct

SEQ ID NO: 3293 - DNA, 20 bp, synthetic construct
  misc_feature 1..20: note = Synthetic Sequence
  source 1..20: mol_type = other DNA
tgaaacaacaggtgctggag

SEQ ID NO: 3294 - DNA, 20 bp, synthetic construct
  misc_feature 1..20: note = Synthetic Sequence
  source 1..20: mol_type = other DNA
ctctaaggggtccacgtgaa

SEQ ID NO: 3295 - DNA, 20 bp, synthetic construct
  misc_feature 1..20: note = Synthetic Sequence
  source 1..20: mol_type = other DNA
ctgattagcctctccaaatg

SEQ ID NO: 3296 - DNA, 20 bp, synthetic construct
  misc_feature 1..20: note = Synthetic Sequence
  source 1..20: mol_type = other DNA
cccagtgacttgggaggcta

SEQ ID NO: 3297 - DNA, 20 bp, synthetic construct
  misc_feature 1..20: note = Synthetic Sequence
  source 1..20: mol_type = other DNA
cattatagcctcaaactccc

SEQ ID NO: 3298 - DNA, 20 bp, synthetic construct
  misc_feature 1..20: note = Synthetic Sequence
  source 1..20: mol_type = other DNA
gcccagtcagtttctcttcc

SEQ ID NO: 3299 - DNA, 20 bp, synthetic construct
  misc_feature 1..20: note = Synthetic Sequence
  source 1..20: mol_type = other DNA
agtgcatgcatcaagtgcaa

SEQ ID NO: 3300 - DNA, 20 bp, synthetic construct
  misc_feature 1..20: note = Synthetic Sequence
  source 1..20: mol_type = other DNA
aggctataatgagccatgat

SEQ ID NO: 3301 - DNA, 20 bp, synthetic construct
  misc_feature 1..20: note = Synthetic Sequence
  source 1..20: mol_type = other DNA
cggggagaggctgggtgcat

SEQ ID NO: 3302 - DNA, 20 bp, synthetic construct
  misc_feature 1..20: note = Synthetic Sequence
  source 1..20: mol_type = other DNA
tcaacaggtgttaaccctag

SEQ ID NO: 3303 - DNA, 20 bp, synthetic construct
  misc_feature 1..20: note = Synthetic Sequence
  source 1..20: mol_type = other DNA
cataacaatattaactttaa

SEQ ID NO: 3304 - DNA, 20 bp, synthetic construct
  misc_feature 1..20: note = Synthetic Sequence
  source 1..20: mol_type = other DNA
aagaccaagaacccactgga

SEQ ID NO: 3305 - DNA, 20 bp, synthetic construct
  misc_feature 1..20: note = Synthetic Sequence
  source 1..20: mol_type = other DNA
aaacttacaatcacagcaga

SEQ ID NO: 3306 - DNA, 20 bp, synthetic construct
  misc_feature 1..20: note = Synthetic Sequence
  source 1..20: mol_type = other DNA
ccttagcctcccaagtcact

SEQ ID NO: 3307 - DNA, 20 bp, synthetic construct
  misc_feature 1..20: note = Synthetic Sequence
  source 1..20: mol_type = other DNA
aagacaaatgagaagagggc

SEQ ID NO: 3308 - DNA, 20 bp, synthetic construct
  misc_feature 1..20: note = Synthetic Sequence
  source 1..20: mol_type = other DNA
tttattaattacccagtctc

SEQ ID NO: 3309 - DNA, 20 bp, synthetic construct
  misc_feature 1..20: note = Synthetic Sequence
  source 1..20: mol_type = other DNA
atcaacccttcatctacatt

SEQ ID NO: 3310 - DNA, 20 bp, synthetic construct
  misc_feature 1..20: note = Synthetic Sequence
  source 1..20: mol_type = other DNA
tttccaagtggaggccgcag

SEQ ID NO: 3311 - DNA, 20 bp, synthetic construct
  misc_feature 1..20: note = Synthetic Sequence
  source 1..20: mol_type = other DNA
tgtaggtcagctcagacaca

SEQ ID NO: 3312 - DNA, 20 bp, synthetic construct
  misc_feature 1..20: note = Synthetic Sequence
  source 1..20: mol_type = other DNA
atccaggaagagaaactgac

SEQ ID NO: 3313 - DNA, 20 bp, synthetic construct
  misc_feature 1..20: note = Synthetic Sequence
  source 1..20: mol_type = other DNA
ttcctatatttctaggagtt

SEQ ID NO: 3314 - DNA, 20 bp, synthetic construct
  misc_feature 1..20: note = Synthetic Sequence
  source 1..20: mol_type = other DNA
tgattcagttacctccccct

SEQ ID NO: 3315 - DNA, 20 bp, synthetic construct
  misc_feature 1..20: note = Synthetic Sequence
  source 1..20: mol_type = other DNA
gactgcaaaacatcattatt

SEQ ID NO: 3316 - DNA, 20 bp, synthetic construct
  misc_feature 1..20: note = Synthetic Sequence
  source 1..20: mol_type = other DNA
aatttatttggaaataaaca

SEQ ID NO: 3317 - DNA, 20 bp, synthetic construct
  misc_feature 1..20: note = Synthetic Sequence
  source 1..20: mol_type = other DNA
tggtttagaaaggggagggg

SEQ ID NO: 3318 - DNA, 20 bp, synthetic construct
  misc_feature 1..20: note = Synthetic Sequence
  source 1..20: mol_type = other DNA
tgctctattctaacttggct

SEQ ID NO: 3319 - DNA, 20 bp, synthetic construct
  misc_feature 1..20: note = Synthetic Sequence
  source 1..20: mol_type = other DNA
tggagtttcactcgtcaccc

SEQ ID NO: 3320 - DNA, 20 bp, synthetic construct
  misc_feature 1..20: note = Synthetic Sequence
  source 1..20: mol_type = other DNA
gccctcatgaactggctgct

SEQ ID NO: 3321 - DNA, 20 bp, synthetic construct
  misc_feature 1..20: note = Synthetic Sequence
  source 1..20: mol_type = other DNA
aattaaagaaaacacaaaaa

SEQ ID NO: 3322 - DNA, 20 bp, synthetic construct
  misc_feature 1..20: note = Synthetic Sequence
  source 1..20: mol_type = other DNA
gtctgtaatctgagcacttt

SEQ ID NO: 3323 - DNA, 20 bp, synthetic construct
  misc_feature 1..20: note = Synthetic Sequence
  source 1..20: mol_type = other DNA
gggagaggctgggtgcatag

SEQ ID NO: 3324 - DNA, 20 bp, synthetic construct
  misc_feature 1..20: note = Synthetic Sequence
  source 1..20: mol_type = other DNA
atcaggcataaatattctga

SEQ ID NO: 3325 - DNA, 20 bp, synthetic construct
  misc_feature 1..20: note = Synthetic Sequence
  source 1..20: mol_type = other DNA
ggaactgagaactttccaag

SEQ ID NO: 3326 - DNA, 20 bp, synthetic construct
  misc_feature 1..20: note = Synthetic Sequence
  source 1..20: mol_type = other DNA
caggagttcaaggtcagcca

SEQ ID NO: 3327 - DNA, 20 bp, synthetic construct
  misc_feature 1..20: note = Synthetic Sequence
  source 1..20: mol_type = other DNA
atgagccagtttatccatct

SEQ ID NO: 3328 - DNA, 20 bp, synthetic construct
  misc_feature 1..20: note = Synthetic Sequence
  source 1..20: mol_type = other DNA
ccactagatttagcatttca

SEQ ID NO: 3329 - DNA, 20 bp, synthetic construct
  misc_feature 1..20: note = Synthetic Sequence
  source 1..20: mol_type = other DNA
atttcacaatcaacagtatg

SEQ ID NO: 3330 - DNA, 20 bp, synthetic construct
  misc_feature 1..20: note = Synthetic Sequence
  source 1..20: mol_type = other DNA
gctagacacagggtgttgat

SEQ ID NO: 3331 - DNA, 20 bp, synthetic construct
  misc_feature 1..20: note = Synthetic Sequence
  source 1..20: mol_type = other DNA
aatgaaagagacgtgcatgc

SEQ ID NO: 3332 - DNA, 20 bp, synthetic construct
  misc_feature 1..20: note = Synthetic Sequence
  source 1..20: mol_type = other DNA
gaaagttctcagttccctcc

SEQ ID NO: 3333 - DNA, 20 bp, synthetic construct
  misc_feature 1..20: note = Synthetic Sequence
  source 1..20: mol_type = other DNA
agggcacccccttcagagct

SEQ ID NO: 3334 - DNA, 20 bp, synthetic construct
  misc_feature 1..20: note = Synthetic Sequence
  source 1..20: mol_type = other DNA
gattacctcctatgaaactc

SEQ ID NO: 3335 - DNA, 20 bp, synthetic construct
  misc_feature 1..20: note = Synthetic Sequence
  source 1..20: mol_type = other DNA
tctgaagggggtgccctggt

SEQ ID NO: 3336 - DNA, 20 bp, synthetic construct
  misc_feature 1..20: note = Synthetic Sequence
  source 1..20: mol_type = other DNA
ccaggtactcagctaagcac

SEQ ID NO: 3337 - DNA, 20 bp, synthetic construct
  misc_feature 1..20: note = Synthetic Sequence
  source 1..20: mol_type = other DNA
cttcacaatgaaccagtaat

SEQ ID NO: 3338 - DNA, 20 bp, synthetic construct
  misc_feature 1..20: note = Synthetic Sequence
  source 1..20: mol_type = other DNA
tccaggaagagaaactgact

SEQ ID NO: 3339 - DNA, 20 bp, synthetic construct
  misc_feature 1..20: note = Synthetic Sequence
  source 1..20: mol_type = other DNA
caagttacttctatatagaa

SEQ ID NO: 3340 - DNA, 20 bp, synthetic construct
  misc_feature 1..20: note = Synthetic Sequence
  source 1..20: mol_type = other DNA
actgagaactttccaagtgg

SEQ ID NO: 3341 - DNA, 20 bp, synthetic construct
  misc_feature 1..20: note = Synthetic Sequence
  source 1..20: mol_type = other DNA
cttgaattaatctttgtata

SEQ ID NO: 3342 - DNA, 20 bp, synthetic construct
  misc_feature 1..20: note = Synthetic Sequence
  source 1..20: mol_type = other DNA
tattcaggtacaaaaagatt

SEQ ID NO: 3343 - DNA, 20 bp, synthetic construct
  misc_feature 1..20: note = Synthetic Sequence
  source 1..20: mol_type = other DNA
caaaaatcagcctggtgcgg

SEQ ID NO: 3344 - DNA, 20 bp, synthetic construct
  misc_feature 1..20: note = Synthetic Sequence
  source 1..20: mol_type = other DNA
tgtgactttatttggaaata

SEQ ID NO: 3345 - DNA, 20 bp, synthetic construct
  misc_feature 1..20: note = Synthetic Sequence
  source 1..20: mol_type = other DNA
ccacaacagtccccagagtg

SEQ ID NO: 3346 - DNA, 20 bp, synthetic construct
  misc_feature 1..20: note = Synthetic Sequence
  source 1..20: mol_type = other DNA
acagcaggagggacaatgat

SEQ ID NO: 3347 - DNA, 20 bp, synthetic construct
  misc_feature 1..20: note = Synthetic Sequence
  source 1..20: mol_type = other DNA
aaacaatccaattaaaaaat

SEQ ID NO: 3348 - DNA, 20 bp, synthetic construct
  misc_feature 1..20: note = Synthetic Sequence
  source 1..20: mol_type = other DNA
gagacggggtttctccatga

SEQ ID NO: 3349 - DNA, 20 bp, synthetic construct
  misc_feature 1..20: note = Synthetic Sequence
  source 1..20: mol_type = other DNA
agatgtaagaggcctctaac

SEQ ID NO: 3350 - DNA, 20 bp, synthetic construct
  misc_feature 1..20: note = Synthetic Sequence
  source 1..20: mol_type = other DNA
gctagacacaaaagttctcc

SEQ ID NO: 3351 - DNA, 20 bp, synthetic construct
  misc_feature 1..20: note = Synthetic Sequence
  source 1..20: mol_type = other DNA
gaacgatggtcgtggggctg

SEQ ID NO: 3352 - DNA, 20 bp, synthetic construct
  misc_feature 1..20: note = Synthetic Sequence
  source 1..20: mol_type = other DNA
acagttacacatggctgggg

SEQ ID NO: 3353 - DNA, 20 bp, synthetic construct
  misc_feature 1..20: note = Synthetic Sequence
  source 1..20: mol_type = other DNA
catttgaccttcatactctg

SEQ ID NO: 3354 - DNA, 20 bp, synthetic construct
  misc_feature 1..20: note = Synthetic Sequence
  source 1..20: mol_type = other DNA
acatcattattaggggcagc

SEQ ID NO: 3355 - DNA, 20 bp, synthetic construct
  misc_feature 1..20: note = Synthetic Sequence
  source 1..20: mol_type = other DNA
atacaaagattaattcaaga

SEQ ID NO: 3356 - DNA, 20 bp, synthetic construct
  misc_feature 1..20: note = Synthetic Sequence
  source 1..20: mol_type = other DNA
tcccacctcaacctcccacg

SEQ ID NO: 3357 - DNA, 20 bp, synthetic construct
  misc_feature 1..20: note = Synthetic Sequence
  source 1..20: mol_type = other DNA
tatattaaatgaaataagcc

SEQ ID NO: 3358 - DNA, 20 bp, synthetic construct
  misc_feature 1..20: note = Synthetic Sequence
  source 1..20: mol_type = other DNA
acatgagcaattggtggcgg

SEQ ID NO: 3359 - DNA, 20 bp, synthetic construct
  misc_feature 1..20: note = Synthetic Sequence
  source 1..20: mol_type = other DNA
agccacgtgggaggttgagg

SEQ ID NO: 3360 - DNA, 20 bp, synthetic construct
  misc_feature 1..20: note = Synthetic Sequence
  source 1..20: mol_type = other DNA
tggatagaatccagggctcg

SEQ ID NO: 3361 - DNA, 20 bp, synthetic construct
  misc_feature 1..20: note = Synthetic Sequence
  source 1..20: mol_type = other DNA
atgagcaattggtggcggtg

SEQ ID NO: 3362 - DNA, 20 bp, synthetic construct
  misc_feature 1..20: note = Synthetic Sequence
  source 1..20: mol_type = other DNA
aggacatgagcaattggtgg

SEQ ID NO: 3363 - DNA, 20 bp, synthetic construct
  misc_feature 1..20: note = Synthetic Sequence
  source 1..20: mol_type = other DNA
cagcgacagctacaggcttt

SEQ ID NO: 3364 - DNA, 20 bp, synthetic construct
  misc_feature 1..20: note = Synthetic Sequence
  source 1..20: mol_type = other DNA
gccgaggcgtgcggatcacg

SEQ ID NO: 3365 - DNA, 20 bp, synthetic construct
  misc_feature 1..20: note = Synthetic Sequence
  source 1..20: mol_type = other DNA
tgacggatcggggagaggct

SEQ ID NO: 3366 - DNA, 20 bp, synthetic construct
  misc_feature 1..20: note = Synthetic Sequence
  source 1..20: mol_type = other DNA
gcaagttacttctatataga

SEQ ID NO: 3367 - DNA, 20 bp, synthetic construct
  misc_feature 1..20: note = Synthetic Sequence
  source 1..20: mol_type = other DNA
agcgtgaggaacgtgactgg

SEQ ID NO: 3368 - DNA, 20 bp, synthetic construct
  misc_feature 1..20: note = Synthetic Sequence
  source 1..20: mol_type = other DNA
atatatttatggggtacatg

SEQ ID NO: 3369 - DNA, 20 bp, synthetic construct
  misc_feature 1..20: note = Synthetic Sequence
  source 1..20: mol_type = other DNA
atgcttacattgtctcatct

SEQ ID NO: 3370 - DNA, 20 bp, synthetic construct
  misc_feature 1..20: note = Synthetic Sequence
  source 1..20: mol_type = other DNA
tacaacaaattagccgggcg

SEQ ID NO: 3371 - DNA, 20 bp, synthetic construct
  misc_feature 1..20: note = Synthetic Sequence
  source 1..20: mol_type = other DNA
gaaaatcatttgaacccggg

SEQ ID NO: 3372 - DNA, 20 bp, synthetic construct
  misc_feature 1..20: note = Synthetic Sequence
  source 1..20: mol_type = other DNA
gtgacttgggaggctaaggc

SEQ ID NO: 3373 - DNA, 20 bp, synthetic construct
  misc_feature 1..20: note = Synthetic Sequence
  source 1..20: mol_type = other DNA
tgccatgctcctgagaatct

SEQ ID NO: 3374 - DNA, 20 bp, synthetic construct
  misc_feature 1..20: note = Synthetic Sequence
  source 1..20: mol_type = other DNA
ccacactctggggactgttg

SEQ ID NO: 3375 - DNA, 20 bp, synthetic construct
  misc_feature 1..20: note = Synthetic Sequence
  source 1..20: mol_type = other DNA
caccaaactcctagaaatat

SEQ ID NO: 3376 - DNA, 20 bp, synthetic construct
  misc_feature 1..20: note = Synthetic Sequence
  source 1..20: mol_type = other DNA
gactagaactcaagcagaat

SEQ ID NO: 3377 - DNA, 20 bp, synthetic construct
  misc_feature 1..20: note = Synthetic Sequence
  source 1..20: mol_type = other DNA
catgaaatgctaaatctagt

SEQ ID NO: 3378 - DNA, 20 bp, synthetic construct
  misc_feature 1..20: note = Synthetic Sequence
  source 1..20: mol_type = other DNA
ctgtacaggaagcatggcta

SEQ ID NO: 3379 - DNA, 20 bp, synthetic construct
  misc_feature 1..20: note = Synthetic Sequence
  source 1..20: mol_type = other DNA
gtcgtcagaattcagaacga

SEQ ID NO: 3380 - DNA, 20 bp, synthetic construct
  misc_feature 1..20: note = Synthetic Sequence
  source 1..20: mol_type = other DNA
cattgcagtctttattgttt

SEQ ID NO: 3381 - DNA, 20 bp, synthetic construct
  misc_feature 1..20: note = Synthetic Sequence
  source 1..20: mol_type = other DNA
tctcttaatcctgtcagttg

SEQ ID NO: 3382 - DNA, 20 bp, synthetic construct
  misc_feature 1..20: note = Synthetic Sequence
  source 1..20: mol_type = other DNA
gggcacccccttcagagcta

SEQ ID NO: 3383 - DNA, 20 bp, synthetic construct
  misc_feature 1..20: note = Synthetic Sequence
  source 1..20: mol_type = other DNA
gaggggactttcccataagc

SEQ ID NO: 3384 - DNA, 20 bp, synthetic construct
  misc_feature 1..20: note = Synthetic Sequence
  source 1..20: mol_type = other DNA
gattctatccaagccacgag

SEQ ID NO: 3385 - DNA, 20 bp, synthetic construct
  misc_feature 1..20: note = Synthetic Sequence
  source 1..20: mol_type = other DNA
gacgagcggatcacgaggtc

SEQ ID NO: 3386 - DNA, 20 bp, synthetic construct
  misc_feature 1..20: note = Synthetic Sequence
  source 1..20: mol_type = other DNA
gtcatgtgtccactggacag

SEQ ID NO: 3387 - DNA, 20 bp, synthetic construct
  misc_feature 1..20: note = Synthetic Sequence
  source 1..20: mol_type = other DNA
acccagcactgattccgacc

SEQ ID NO: 3388 - DNA, 20 bp, synthetic construct
  misc_feature 1..20: note = Synthetic Sequence
  source 1..20: mol_type = other DNA
tgagaacagtctgggaaaca

SEQ ID NO: 3389 - DNA, 20 bp, synthetic construct
  misc_feature 1..20: note = Synthetic Sequence
  source 1..20: mol_type = other DNA
tcccgagattctcaggagca

SEQ ID NO: 3390 - DNA, 20 bp, synthetic construct
  misc_feature 1..20: note = Synthetic Sequence
  source 1..20: mol_type = other DNA
gtgcaatggcgcaaccttgc

SEQ ID NO: 3391 - DNA, 20 bp, synthetic construct
  misc_feature 1..20: note = Synthetic Sequence
  source 1..20: mol_type = other DNA
ataaaaattgtatatattta

SEQ ID NO: 3392 - DNA, 20 bp, synthetic construct
  misc_feature 1..20: note = Synthetic Sequence
  source 1..20: mol_type = other DNA
cccagcactgattccgacca

SEQ ID NO: 3393 - DNA, 20 bp, synthetic construct
  misc_feature 1..20: note = Synthetic Sequence
  source 1..20: mol_type = other DNA
aacgatggtcgtggggctgg

SEQ ID NO: 3394 - DNA, 20 bp, synthetic construct
  misc_feature 1..20: note = Synthetic Sequence
  source 1..20: mol_type = other DNA
ggcatttgcagcaacctaga

SEQ ID NO: 3395 - DNA, 20 bp, synthetic construct
  misc_feature 1..20: note = Synthetic Sequence
  source 1..20: mol_type = other DNA
gccacgtgggaggttgaggt

SEQ ID NO: 3396 - DNA, 20 bp, synthetic construct
  misc_feature 1..20: note = Synthetic Sequence
  source 1..20: mol_type = other DNA
atcattgttggacattgggt

SEQ ID NO: 3397 - DNA, 20 bp, synthetic construct
  misc_feature 1..20: note = Synthetic Sequence
  source 1..20: mol_type = other DNA
ctcaggtgctccacctgcct

SEQ ID NO: 3398 - DNA, 20 bp, synthetic construct
  misc_feature 1..20: note = Synthetic Sequence
  source 1..20: mol_type = other DNA
gccagcagcagcaacccact

SEQ ID NO: 3399 - DNA, 20 bp, synthetic construct
  misc_feature 1..20: note = Synthetic Sequence
  source 1..20: mol_type = other DNA
agcacaccaaggacctgcac

SEQ ID NO: 3400 - DNA, 20 bp, synthetic construct
  misc_feature 1..20: note = Synthetic Sequence
  source 1..20: mol_type = other DNA
gggtcatgtgtccactggac

SEQ ID NO: 3401 - DNA, 20 bp, synthetic construct
  misc_feature 1..20: note = Synthetic Sequence
  source 1..20: mol_type = other DNA
tgcttgaaactggaaggcag

SEQ ID NO: 3402 - DNA, 20 bp, synthetic construct
  misc_feature 1..20: note = Synthetic Sequence
  source 1..20: mol_type = other DNA
caaaacaataaagactgcaa

SEQ ID NO: 3403 - DNA, 20 bp, synthetic construct
  misc_feature 1..20: note = Synthetic Sequence
  source 1..20: mol_type = other DNA
tctcagctactcgggaggct

SEQ ID NO: 3404 - DNA, 20 bp, synthetic construct
  misc_feature 1..20: note = Synthetic Sequence
  source 1..20: mol_type = other DNA
agaacgatggtcgtggggct

SEQ ID NO: 3405 - DNA, 20 bp, synthetic construct
  misc_feature 1..20: note = Synthetic Sequence
  source 1..20: mol_type = other DNA
agaatggcatgaacccagga

SEQ ID NO: 3406 - DNA, 20 bp, synthetic construct
  misc_feature 1..20: note = Synthetic Sequence
  source 1..20: mol_type = other DNA
atcagtgcagcctggcattt

SEQ ID NO: 3407 - DNA, 20 bp, synthetic construct
  misc_feature 1..20: note = Synthetic Sequence
  source 1..20: mol_type = other DNA
ataaatgataaaatgtttag

SEQ ID NO: 3408 - DNA, 20 bp, synthetic construct
  misc_feature 1..20: note = Synthetic Sequence
  source 1..20: mol_type = other DNA
tgagcaattggtggcggtgg

SEQ ID NO: 3409 - DNA, 20 bp, synthetic construct
  misc_feature 1..20: note = Synthetic Sequence
  source 1..20: mol_type = other DNA
cagaacgatggtcgtggggc

SEQ ID NO: 3410 - DNA, 20 bp, synthetic construct
  misc_feature 1..20: note = Synthetic Sequence
  source 1..20: mol_type = other DNA
ggtgacctcctgtgagcggg

SEQ ID NO: 3411 - DNA, 20 bp, synthetic construct
  misc_feature 1..20: note = Synthetic Sequence
  source 1..20: mol_type = other DNA
atgagatttgggagggacca

SEQ ID NO: 3412 - DNA, 20 bp, synthetic construct
  misc_feature 1..20: note = Synthetic Sequence
  source 1..20: mol_type = other DNA
ggtcatgtgtccactggaca

SEQ ID NO: 3413 - DNA, 20 bp, synthetic construct
  misc_feature 1..20: note = Synthetic Sequence
  source 1..20: mol_type = other DNA
ataactgcagcctgagagtt

SEQ ID NO: 3414 - DNA, 20 bp, synthetic construct
  misc_feature 1..20: note = Synthetic Sequence
  source 1..20: mol_type = other DNA
catgagcaattggtggcggt

SEQ ID NO: 3415 - DNA, 20 bp, synthetic construct
  misc_feature 1..20: note = Synthetic Sequence
  source 1..20: mol_type = other DNA
tttcacacagaagaaaactg

SEQ ID NO: 3416 - DNA, 20 bp, synthetic construct
  misc_feature 1..20: note = Synthetic Sequence
  source 1..20: mol_type = other DNA
cattattaggggcagctgga

SEQ ID NO: 3417 - DNA, 20 bp, synthetic construct
  misc_feature 1..20: note = Synthetic Sequence
  source 1..20: mol_type = other DNA
ttgcctaaggatggctgaac

SEQ ID NO: 3418 - DNA, 20 bp, synthetic construct
  misc_feature 1..20: note = Synthetic Sequence
  source 1..20: mol_type = other DNA
aaatacaaaaaaaaattagt

SEQ ID NO: 3419 - DNA, 20 bp, synthetic construct
  misc_feature 1..20: note = Synthetic Sequence
  source 1..20: mol_type = other DNA
gtaagcgtgaggaacgtgac

SEQ ID NO: 3420 - DNA, 20 bp, synthetic construct
  misc_feature 1..20: note = Synthetic Sequence
  source 1..20: mol_type = other DNA
gagattctcaggagcatggc

SEQ ID NO: 3421 - DNA, 20 bp, synthetic construct
  misc_feature 1..20: note = Synthetic Sequence
  source 1..20: mol_type = other DNA
ttctcacagttctgggggct

SEQ ID NO: 3422 - DNA, 20 bp, synthetic construct
  misc_feature 1..20: note = Synthetic Sequence
  source 1..20: mol_type = other DNA
ctcacatttccacatggctg

SEQ ID NO: 3423 - DNA, 20 bp, synthetic construct
  misc_feature 1..20: note = Synthetic Sequence
  source 1..20: mol_type = other DNA
ttggacaaaaattaaaactc

SEQ ID NO: 3424 - DNA, 20 bp, synthetic construct
  misc_feature 1..20: note = Synthetic Sequence
  source 1..20: mol_type = other DNA
acgaggctgtttatttcacc

SEQ ID NO: 3425 - DNA, 20 bp, synthetic construct
  misc_feature 1..20: note = Synthetic Sequence
  source 1..20: mol_type = other DNA
gctgaggcaggtggatcaag

SEQ ID NO: 3426 - DNA, 20 bp, synthetic construct
  misc_feature 1..20: note = Synthetic Sequence
  source 1..20: mol_type = other DNA
agtagagacggagtttcacc

SEQ ID NO: 3427 - DNA, 20 bp, synthetic construct
  misc_feature 1..20: note = Synthetic Sequence
  source 1..20: mol_type = other DNA
gctcagaggagacccacagt

SEQ ID NO: 3428 - DNA, 20 bp, synthetic construct
  misc_feature 1..20: note = Synthetic Sequence
  source 1..20: mol_type = other DNA
ggaacagggtttcaccatgt

SEQ ID NO: 3429 - DNA, 20 bp, synthetic construct
  misc_feature 1..20: note = Synthetic Sequence
  source 1..20: mol_type = other DNA
caggagaatcgcctgagcct

SEQ ID NO: 3430 - DNA, 20 bp, synthetic construct
  misc_feature 1..20: note = Synthetic Sequence
  source 1..20: mol_type = other DNA
aatgtcatgaacctgggagg

SEQ ID NO: 3431 - DNA, 20 bp, synthetic construct
  misc_feature 1..20: note = Synthetic Sequence
  source 1..20: mol_type = other DNA
cagggaggctaagaggcggg

SEQ ID NO: 3432 - DNA, 20 bp, synthetic construct
  misc_feature 1..20: note = Synthetic Sequence
  source 1..20: mol_type = other DNA
ctcaaaagaagacacataaa

SEQ ID NO: 3433 - DNA, 20 bp, synthetic construct
  misc_feature 1..20: note = Synthetic Sequence
  source 1..20: mol_type = other DNA
cgcaggacatatgcttcaac

SEQ ID NO: 3434 - DNA, 20 bp, synthetic construct
  misc_feature 1..20: note = Synthetic Sequence
  source 1..20: mol_type = other DNA
actgtaagtctcctgaaagc

SEQ ID NO: 3435 - DNA, 20 bp, synthetic construct
  misc_feature 1..20: note = Synthetic Sequence
  source 1..20: mol_type = other DNA
tgggaggggctgggcatggt

SEQ ID NO: 3436 - DNA, 20 bp, synthetic construct
  misc_feature 1..20: note = Synthetic Sequence
  source 1..20: mol_type = other DNA
tggagtcttgctctgtcgct

SEQ ID NO: 3437 - DNA, 20 bp, synthetic construct
  misc_feature 1..20: note = Synthetic Sequence
  source 1..20: mol_type = other DNA
agccaagggagataggggtg

SEQ ID NO: 3438 - DNA, 20 bp, synthetic construct
  misc_feature 1..20: note = Synthetic Sequence
  source 1..20: mol_type = other DNA
tgacaccagcatgggcaata

SEQ ID NO: 3439 - DNA, 20 bp, synthetic construct
  misc_feature 1..20: note = Synthetic Sequence
  source 1..20: mol_type = other DNA
agaaggctgtaaagctttat

SEQ ID NO: 3440 - DNA, 20 bp, synthetic construct
  misc_feature 1..20: note = Synthetic Sequence
  source 1..20: mol_type = other DNA
tttagacagaaatattgaaa

SEQ ID NO: 3441 - DNA, 20 bp, synthetic construct
  misc_feature 1..20: note = Synthetic Sequence
  source 1..20: mol_type = other DNA
attaggggcagctggatgga

SEQ ID NO: 3442 - DNA, 20 bp, synthetic construct
  misc_feature 1..20: note = Synthetic Sequence
  source 1..20: mol_type = other DNA
ccataagcaggcagaagaaa

SEQ ID NO: 3443 - DNA, 20 bp, synthetic construct
  misc_feature 1..20: note = Synthetic Sequence
  source 1..20: mol_type = other DNA
tatgcatgcatgtgtcttta

SEQ ID NO: 3444 - DNA, 20 bp, synthetic construct
  misc_feature 1..20: note = Synthetic Sequence
  source 1..20: mol_type = other DNA
tgtagcacccctaagctcgc

SEQ ID NO: 3445 - DNA, 20 bp, synthetic construct
  misc_feature 1..20: note = Synthetic Sequence
  source 1..20: mol_type = other DNA
cagtaaagacaaatgagaag

SEQ ID NO: 3446 - DNA, 20 bp, synthetic construct
  misc_feature 1..20: note = Synthetic Sequence
  source 1..20: mol_type = other DNA
agggcaggaagagaagaaaa

SEQ ID NO: 3447 - DNA, 20 bp, synthetic construct
  misc_feature 1..20: note = Synthetic Sequence
  source 1..20: mol_type = other DNA
ttggtcacagggtctgatgc

SEQ ID NO: 3448 - DNA, 20 bp, synthetic construct
  misc_feature 1..20: note = Synthetic Sequence
  source 1..20: mol_type = other DNA
cccagcaatttgagaggtcg

SEQ ID NO: 3449 - DNA, 20 bp, synthetic construct
  misc_feature 1..20: note = Synthetic Sequence
  source 1..20: mol_type = other DNA
gatgagccagtttatccatc

SEQ ID NO: 3450 - DNA, 20 bp, synthetic construct
  misc_feature 1..20: note = Synthetic Sequence
  source 1..20: mol_type = other DNA
cacctgaatccaggaggtgg

SEQ ID NO: 3451 - DNA, 20 bp, synthetic construct
  misc_feature 1..20: note = Synthetic Sequence
  source 1..20: mol_type = other DNA
ggacagaaattgtgcacttg

SEQ ID NO: 3452 - DNA, 20 bp, synthetic construct
  misc_feature 1..20: note = Synthetic Sequence
  source 1..20: mol_type = other DNA
gaattcagaacgatggtcgt

SEQ ID NO: 3453 - DNA, 20 bp, synthetic construct
  misc_feature 1..20: note = Synthetic Sequence
  source 1..20: mol_type = other DNA
atgggaggatcgcttcagcc

SEQ ID NO: 3454 - DNA, 20 bp, synthetic construct
  misc_feature 1..20: note = Synthetic Sequence
  source 1..20: mol_type = other DNA
cttcaccatgttggccaagc

SEQ ID NO: 3455 - DNA, 20 bp, synthetic construct
  misc_feature 1..20: note = Synthetic Sequence
  source 1..20: mol_type = other DNA
gccttagcctcccaagtcac

SEQ ID NO: 3456 - DNA, 20 bp, synthetic construct
  misc_feature 1..20: note = Synthetic Sequence
  source 1..20: mol_type = other DNA
agaacaaaattcctgctttc

SEQ ID NO: 3457 - DNA, 20 bp, synthetic construct
  misc_feature 1..20: note = Synthetic Sequence
  source 1..20: mol_type = other DNA
atctcatggaatatagcaca

SEQ ID NO: 3458 - DNA, 20 bp, synthetic construct
  misc_feature 1..20: note = Synthetic Sequence
  source 1..20: mol_type = other DNA
agtaaagacaaatgagaaga

SEQ ID NO: 3459 - DNA, 20 bp, synthetic construct
  misc_feature 1..20: note = Synthetic Sequence
  source 1..20: mol_type = other DNA
gctcagctctggctgagcct

SEQ ID NO: 3460 - DNA, 20 bp, synthetic construct
  misc_feature 1..20: note = Synthetic Sequence
  source 1..20: mol_type = other DNA
ctcagctctggctgagcctg

SEQ ID NO: 3461 - DNA, 20 bp, synthetic construct
  misc_feature 1..20: note = Synthetic Sequence
  source 1..20: mol_type = other DNA
ggttaacacctgttgaagga

SEQ ID NO: 3462 - DNA, 20 bp, synthetic construct
  misc_feature 1..20: note = Synthetic Sequence
  source 1..20: mol_type = other DNA
cccagtggggaggatcctgc

SEQ ID NO: 3463 - DNA, 20 bp, synthetic construct
  misc_feature 1..20: note = Synthetic Sequence
  source 1..20: mol_type = other DNA
cctcaggaaactgacaatca

SEQ ID NO: 3464 - DNA, 20 bp, synthetic construct
  misc_feature 1..20: note = Synthetic Sequence
  source 1..20: mol_type = other DNA
ctcagccacgtgggaggttg

SEQ ID NO: 3465 - DNA, 20 bp, synthetic construct
  misc_feature 1..20: note = Synthetic Sequence
  source 1..20: mol_type = other DNA
gcatatgtcctgcgagctta

SEQ ID NO: 3466 - DNA, 20 bp, synthetic construct
  misc_feature 1..20: note = Synthetic Sequence
  source 1..20: mol_type = other DNA
gctactctggacgctgaggc

SEQ ID NO: 3467 - DNA, 20 bp, synthetic construct
  misc_feature 1..20: note = Synthetic Sequence
  source 1..20: mol_type = other DNA
aatatttacagtttatactc

SEQ ID NO: 3468 - DNA, 20 bp, synthetic construct
  misc_feature 1..20: note = Synthetic Sequence
  source 1..20: mol_type = other DNA
agcatatgtcctgcgagctt

SEQ ID NO: 3469 - DNA, 20 bp, synthetic construct
  misc_feature 1..20: note = Synthetic Sequence
  source 1..20: mol_type = other DNA
gccgcagaggcaaggccctg

SEQ ID NO: 3470 - DNA, 20 bp, synthetic construct
  misc_feature 1..20: note = Synthetic Sequence
  source 1..20: mol_type = other DNA
atgactctgaagaatggcgt

SEQ ID NO: 3471 - DNA, 20 bp, synthetic construct
  misc_feature 1..20: note = Synthetic Sequence
  source 1..20: mol_type = other DNA
agaattcagaacgatggtcg

SEQ ID NO: 3472 - DNA, 20 bp, synthetic construct
  misc_feature 1..20: note = Synthetic Sequence
  source 1..20: mol_type = other DNA
tgtaattacagaatatgtga

SEQ ID NO: 3473 - DNA, 20 bp, synthetic construct
  misc_feature 1..20: note = Synthetic Sequence
  source 1..20: mol_type = other DNA
agctcagaggagacccacag

SEQ ID NO: 3474 - DNA, 20 bp, synthetic construct
  misc_feature 1..20: note = Synthetic Sequence
  source 1..20: mol_type = other DNA
tcaatcagcactctgtaaaa

SEQ ID NO: 3475 - DNA, 20 bp, synthetic construct
  misc_feature 1..20: note = Synthetic Sequence
  source 1..20: mol_type = other DNA
cgaggcaggcggatcacccg

SEQ ID NO: 3476 - DNA, 20 bp, synthetic construct
  misc_feature 1..20: note = Synthetic Sequence
  source 1..20: mol_type = other DNA
ctgagggggtggatcacctg

SEQ ID NO: 3477 - DNA, 20 bp, synthetic construct
  misc_feature 1..20: note = Synthetic Sequence
  source 1..20: mol_type = other DNA
ggcagctggatggaaggtat

SEQ ID NO: 3478 - DNA, 20 bp, synthetic construct
  misc_feature 1..20: note = Synthetic Sequence
  source 1..20: mol_type = other DNA
actgggaggtgtttggtcat

SEQ ID NO: 3479 - DNA, 20 bp, synthetic construct
  misc_feature 1..20: note = Synthetic Sequence
  source 1..20: mol_type = other DNA
gccttagccacccaagtagc

SEQ ID NO: 3480 - DNA, 20 bp, synthetic construct
  misc_feature 1..20: note = Synthetic Sequence
  source 1..20: mol_type = other DNA
aagtacattatcacaagggc

SEQ ID NO: 3481 - DNA, 20 bp, synthetic construct
  misc_feature 1..20: note = Synthetic Sequence
  source 1..20: mol_type = other DNA
attaagagtcctttattagc

SEQ ID NO: 3482 - DNA, 20 bp, synthetic construct
  misc_feature 1..20: note = Synthetic Sequence
  source 1..20: mol_type = other DNA
agctggatggaaggtatagg

SEQ ID NO: 3483 - DNA, 20 bp, synthetic construct
  misc_feature 1..20: note = Synthetic Sequence
  source 1..20: mol_type = other DNA
attgattagcatatgattta

SEQ ID NO: 3484 - DNA, 20 bp, synthetic construct
  misc_feature 1..20: note = Synthetic Sequence
  source 1..20: mol_type = other DNA
acctcagggccttgcctctg

SEQ ID NO: 3485 - DNA, 20 bp, synthetic construct
  misc_feature 1..20: note = Synthetic Sequence
  source 1..20: mol_type = other DNA
tcacagctgaattccaccag

SEQ ID NO: 3486 - DNA, 20 bp, synthetic construct
  misc_feature 1..20: note = Synthetic Sequence
  source 1..20: mol_type = other DNA
tgataagagaccatcctcca

SEQ ID NO: 3487 - DNA, 20 bp, synthetic construct
  misc_feature 1..20: note = Synthetic Sequence
  source 1..20: mol_type = other DNA
atggaggatggtctcttatc

SEQ ID NO: 3488 - DNA, 20 bp, synthetic construct
  misc_feature 1..20: note = Synthetic Sequence
  source 1..20: mol_type = other DNA
cacaagattaaacgaaaagt

SEQ ID NO: 3489 - DNA, 20 bp, synthetic construct
  misc_feature 1..20: note = Synthetic Sequence
  source 1..20: mol_type = other DNA
agcaatttgagaggtcgagg

SEQ ID NO: 3490 - DNA, 20 bp, synthetic construct
  misc_feature 1..20: note = Synthetic Sequence
  source 1..20: mol_type = other DNA
tctaatgattatgtgtcttg

SEQ ID NO: 3491 - DNA, 20 bp, synthetic construct
  misc_feature 1..20: note = Synthetic Sequence
  source 1..20: mol_type = other DNA
gagaatacatttaaattaaa

SEQ ID NO: 3492 - DNA, 20 bp, synthetic construct
  misc_feature 1..20: note = Synthetic Sequence
  source 1..20: mol_type = other DNA
tttgagttgtcccacctttc

SEQ ID NO: 3493 - DNA, 20 bp, synthetic construct
  misc_feature 1..20: note = Synthetic Sequence
  source 1..20: mol_type = other DNA
tatattaccaaggctttgac

SEQ ID NO: 3494 - DNA, 20 bp, synthetic construct
  misc_feature 1..20: note = Synthetic Sequence
  source 1..20: mol_type = other DNA
ataaggacatacccgagact

SEQ ID NO: 3495 - DNA, 20 bp, synthetic construct
  misc_feature 1..20: note = Synthetic Sequence
  source 1..20: mol_type = other DNA
ggcaggagatcacttgaacc

SEQ ID NO: 3496 - DNA, 20 bp, synthetic construct
  misc_feature 1..20: note = Synthetic Sequence
  source 1..20: mol_type = other DNA
catatgtcctgcgagcttag

SEQ ID NO: 3497 - DNA, 20 bp, synthetic construct
  misc_feature 1..20: note = Synthetic Sequence
  source 1..20: mol_type = other DNA
taccacaaaagaagtgaaaa

SEQ ID NO: 3498 - DNA, 20 bp, synthetic construct
  misc_feature 1..20: note = Synthetic Sequence
  source 1..20: mol_type = other DNA
cctcgacctctcaaattgct

SEQ ID NO: 3499 - DNA, 20 bp, synthetic construct
  misc_feature 1..20: note = Synthetic Sequence
  source 1..20: mol_type = other DNA
caggtgagcaccaccacgcc

SEQ ID NO: 3500 - DNA, 20 bp, synthetic construct
  misc_feature 1..20: note = Synthetic Sequence
  source 1..20: mol_type = other DNA
gatgactctgaagaatggcg

SEQ ID NO: 3501 - DNA, 20 bp, synthetic construct
  misc_feature 1..20: note = Synthetic Sequence
  source 1..20: mol_type = other DNA
gaagtcaggagtttgagacc

SEQ ID NO: 3502 - DNA, 20 bp, synthetic construct
  misc_feature 1..20: note = Synthetic Sequence
  source 1..20: mol_type = other DNA
gattgattagcatatgattt

SEQ ID NO: 3503 - DNA, 20 bp, synthetic construct
  misc_feature 1..20: note = Synthetic Sequence
  source 1..20: mol_type = other DNA
cacaagtgatccgcccacct

SEQ ID NO: 3504 - DNA, 20 bp, synthetic construct
  misc_feature 1..20: note = Synthetic Sequence
  source 1..20: mol_type = other DNA
cgatagtttgctgaggatga

SEQ ID NO: 3505 - DNA, 20 bp, synthetic construct
  misc_feature 1..20: note = Synthetic Sequence
  source 1..20: mol_type = other DNA
tcagagaccggtgccagtgc

SEQ ID NO: 3506 - DNA, 20 bp, synthetic construct
  misc_feature 1..20: note = Synthetic Sequence
  source 1..20: mol_type = other DNA
atgaggaaactgaggctcag

SEQ ID NO: 3507 - DNA, 20 bp, synthetic construct
  misc_feature 1..20: note = Synthetic Sequence
  source 1..20: mol_type = other DNA
acagatgaatgaagaaaatg

SEQ ID NO: 3508 - DNA, 20 bp, synthetic construct
  misc_feature 1..20: note = Synthetic Sequence
  source 1..20: mol_type = other DNA
aaatctaaaatcatttcaac

SEQ ID NO: 3509 - DNA, 20 bp, synthetic construct
  misc_feature 1..20: note = Synthetic Sequence
  source 1..20: mol_type = other DNA
actcacatttccacatggct

SEQ ID NO: 3510 - DNA, 20 bp, synthetic construct
  misc_feature 1..20: note = Synthetic Sequence
  source 1..20: mol_type = other DNA
cacatggttggggaggcctc

SEQ ID NO: 3511 - DNA, 20 bp, synthetic construct
  misc_feature 1..20: note = Synthetic Sequence
  source 1..20: mol_type = other DNA
cagtaaggatttcaaaattc

SEQ ID NO: 3512 - DNA, 20 bp, synthetic construct
  misc_feature 1..20: note = Synthetic Sequence
  source 1..20: mol_type = other DNA
gtgaggcccctgcagccatg

SEQ ID NO: 3513 - DNA, 20 bp, synthetic construct
  misc_feature 1..20: note = Synthetic Sequence
  source 1..20: mol_type = other DNA
tctttataacagtgtgagaa

SEQ ID NO: 3514 - DNA, 20 bp, synthetic construct
  misc_feature 1..20: note = Synthetic Sequence
  source 1..20: mol_type = other DNA
agcacggctggggaggcctc

SEQ ID NO: 3515 - DNA, 20 bp, synthetic construct
  misc_feature 1..20: note = Synthetic Sequence
  source 1..20: mol_type = other DNA
tcagagaccggtgctggtgc

SEQ ID NO: 3516 - DNA, 20 bp, synthetic construct
  misc_feature 1..20: note = Synthetic Sequence
  source 1..20: mol_type = other DNA
tgggaggatcgcttaaactc

SEQ ID NO: 3517 - DNA, 20 bp, synthetic construct
  misc_feature 1..20: note = Synthetic Sequence
  source 1..20: mol_type = other DNA
tttgagcgttagccgtctct

SEQ ID NO: 3518 - DNA, 20 bp, synthetic construct
  misc_feature 1..20: note = Synthetic Sequence
  source 1..20: mol_type = other DNA
tgaaccagcctcgcatccca

SEQ ID NO: 3519 - DNA, 20 bp, synthetic construct
  misc_feature 1..20: note = Synthetic Sequence
  source 1..20: mol_type = other DNA
tgattgattgagcaatctag

SEQ ID NO: 3520 - DNA, 20 bp, synthetic construct
  misc_feature 1..20: note = Synthetic Sequence
  source 1..20: mol_type = other DNA
cttaatcctgtcagttgagg

SEQ ID NO: 3521 - DNA, 20 bp, synthetic construct
  misc_feature 1..20: note = Synthetic Sequence
  source 1..20: mol_type = other DNA
tcctgaaaacagcacactga

SEQ ID NO: 3522 - DNA, 20 bp, synthetic construct
  misc_feature 1..20: note = Synthetic Sequence
  source 1..20: mol_type = other DNA
gcgcaagacttctttgcaga

SEQ ID NO: 3523 - DNA, 20 bp, synthetic construct
  misc_feature 1..20: note = Synthetic Sequence
  source 1..20: mol_type = other DNA
ctcaccaagtgaactaaata

SEQ ID NO: 3524 - DNA, 20 bp, synthetic construct
  misc_feature 1..20: note = Synthetic Sequence
  source 1..20: mol_type = other DNA
cacaaagtacattatcacaa

SEQ ID NO: 3525 - DNA, 20 bp, synthetic construct
  misc_feature 1..20: note = Synthetic Sequence
  source 1..20: mol_type = other DNA
tacatgagatagtttgacac

SEQ ID NO: 3526 - DNA, 20 bp, synthetic construct
  misc_feature 1..20: note = Synthetic Sequence
  source 1..20: mol_type = other DNA
ttgaaccagcctcgcatccc

SEQ ID NO: 3527 - DNA, 20 bp, synthetic construct
  misc_feature 1..20: note = Synthetic Sequence
  source 1..20: mol_type = other DNA
agaccagcagagagagagaa

SEQ ID NO: 3528 - DNA, 20 bp, synthetic construct
  misc_feature 1..20: note = Synthetic Sequence
  source 1..20: mol_type = other DNA
tgaactggccaaggtcagaa

SEQ ID NO: 3529 - DNA, 20 bp, synthetic construct
  misc_feature 1..20: note = Synthetic Sequence
  source 1..20: mol_type = other DNA
tcaggagaatcgcttgaact

SEQ ID NO: 3530 - DNA, 20 bp, synthetic construct
  misc_feature 1..20: note = Synthetic Sequence
  source 1..20: mol_type = other DNA
gctcgagagagattcagaga

SEQ ID NO: 3531 - DNA, 20 bp, synthetic construct
  misc_feature 1..20: note = Synthetic Sequence
  source 1..20: mol_type = other DNA
cgcgtgaacccgggaggtgg

SEQ ID NO: 3532 - DNA, 20 bp, synthetic construct
  misc_feature 1..20: note = Synthetic Sequence
  source 1..20: mol_type = other DNA
caaatgttagttgggcatag

SEQ ID NO: 3533 - DNA, 20 bp, synthetic construct
  misc_feature 1..20: note = Synthetic Sequence
  source 1..20: mol_type = other DNA
taggaaaatcccttgagtgc

SEQ ID NO: 3534 - DNA, 20 bp, synthetic construct
  misc_feature 1..20: note = Synthetic Sequence
  source 1..20: mol_type = other DNA
tggtgatatggactatgtga

SEQ ID NO: 3535 - DNA, 20 bp, synthetic construct
  misc_feature 1..20: note = Synthetic Sequence
  source 1..20: mol_type = other DNA
gaatatgtgaaggcttgtga

SEQ ID NO: 3536 - DNA, 20 bp, synthetic construct
  misc_feature 1..20: note = Synthetic Sequence
  source 1..20: mol_type = other DNA
aaggcagctgtggtgtgtga

SEQ ID NO: 3537 - DNA, 20 bp, synthetic construct
  misc_feature 1..20: note = Synthetic Sequence
  source 1..20: mol_type = other DNA
gactcagtttcacatggctg

SEQ ID NO: 3538 - DNA, 20 bp, synthetic construct
  misc_feature 1..20: note = Synthetic Sequence
  source 1..20: mol_type = other DNA
gcagaggcaaggccctgagg

SEQ ID NO: 3539 - DNA, 20 bp, synthetic construct
  misc_feature 1..20: note = Synthetic Sequence
  source 1..20: mol_type = other DNA
tggtcaggggtcctccatac

SEQ ID NO: 3540 - DNA, 20 bp, synthetic construct
  misc_feature 1..20: note = Synthetic Sequence
  source 1..20: mol_type = other DNA
tgagagaaccacttgagccc

SEQ ID NO: 3541 - DNA, 20 bp, synthetic construct
  misc_feature 1..20: note = Synthetic Sequence
  source 1..20: mol_type = other DNA
tgctcagctctggctgagcc

SEQ ID NO: 3542 - DNA, 20 bp, synthetic construct
  misc_feature 1..20: note = Synthetic Sequence
  source 1..20: mol_type = other DNA
tatttacactcaccagacta

SEQ ID NO: 3543 - DNA, 20 bp, synthetic construct
  misc_feature 1..20: note = Synthetic Sequence
  source 1..20: mol_type = other DNA
tgaaatttcagccatgaatc

SEQ ID NO: 3544 - DNA, 20 bp, synthetic construct
  misc_feature 1..20: note = Synthetic Sequence
  source 1..20: mol_type = other DNA
cggagtgtcactctgtcacc

SEQ ID NO: 3545 - DNA, 20 bp, synthetic construct
  misc_feature 1..20: note = Synthetic Sequence
  source 1..20: mol_type = other DNA
acctcagtcccccaaagtgc

SEQ ID NO: 3546 - DNA, 20 bp, synthetic construct
  misc_feature 1..20: note = Synthetic Sequence
  source 1..20: mol_type = other DNA
cacaaggtgctcagtggggg

SEQ ID NO: 3547 - DNA, 20 bp, synthetic construct
  misc_feature 1..20: note = Synthetic Sequence
  source 1..20: mol_type = other DNA
tataaggacatacccgagac

SEQ ID NO: 3548 - DNA, 20 bp, synthetic construct
  misc_feature 1..20: note = Synthetic Sequence
  source 1..20: mol_type = other DNA
atccttagcccaggagttca

SEQ ID NO: 3549 - DNA, 20 bp, synthetic construct
  misc_feature 1..20: note = Synthetic Sequence
  source 1..20: mol_type = other DNA
aatcactgtcttgatttata

SEQ ID NO: 3550 - DNA, 20 bp, synthetic construct
  misc_feature 1..20: note = Synthetic Sequence
  source 1..20: mol_type = other DNA
aattcagaacgatggtcgtg

SEQ ID NO: 3551 - DNA, 20 bp, synthetic construct
  misc_feature 1..20: note = Synthetic Sequence
  source 1..20: mol_type = other DNA
agtgcacggtgtgatagggc

SEQ ID NO: 3552 - DNA, 20 bp, synthetic construct
  misc_feature 1..20: note = Synthetic Sequence
  source 1..20: mol_type = other DNA
caggaaaattgcttgaaccg

SEQ ID NO: 3553 - DNA, 20 bp, synthetic construct
  misc_feature 1..20: note = Synthetic Sequence
  source 1..20: mol_type = other DNA
gccaaggtcagaaagggagc

SEQ ID NO: 3554 - DNA, 20 bp, synthetic construct
  misc_feature 1..20: note = Synthetic Sequence
  source 1..20: mol_type = other DNA
agtagatgttcttcagtgtc

SEQ ID NO: 3555 - DNA, 20 bp, synthetic construct
  misc_feature 1..20: note = Synthetic Sequence
  source 1..20: mol_type = other DNA
caaggcaataaaatatcaca

SEQ ID NO: 3556 - DNA, 20 bp, synthetic construct
  misc_feature 1..20: note = Synthetic Sequence
  source 1..20: mol_type = other DNA
gagacagggtctcactgtgt

SEQ ID NO: 3557 - DNA, 20 bp, synthetic construct
  misc_feature 1..20: note = Synthetic Sequence
  source 1..20: mol_type = other DNA
acacatcaaaaagtgaagca

SEQ ID NO: 3558 - DNA, 20 bp, synthetic construct
  misc_feature 1..20: note = Synthetic Sequence
  source 1..20: mol_type = other DNA
ctccatacaggctgcaattg

SEQ ID NO: 3559 - DNA, 20 bp, synthetic construct
  misc_feature 1..20: note = Synthetic Sequence
  source 1..20: mol_type = other DNA
tacaggaagcgtggctgggg

SEQ ID NO: 3560 - DNA, 20 bp, synthetic construct
  misc_feature 1..20: note = Synthetic Sequence
  source 1..20: mol_type = other DNA
cagaatgatttctattcctt

SEQ ID NO: 3561 - DNA, 20 bp, synthetic construct
  misc_feature 1..20: note = Synthetic Sequence
  source 1..20: mol_type = other DNA
tgattcatggctgaaatttc

SEQ ID NO: 3562 - DNA, 20 bp, synthetic construct
  misc_feature 1..20: note = Synthetic Sequence
  source 1..20: mol_type = other DNA
tctcagggaggctaagaggc

SEQ ID NO: 3563 - DNA, 20 bp, synthetic construct
  misc_feature 1..20: note = Synthetic Sequence
  source 1..20: mol_type = other DNA
ttcaaaattctggaaaaatc

SEQ ID NO: 3564 - DNA, 20 bp, synthetic construct
  misc_feature 1..20: note = Synthetic Sequence
  source 1..20: mol_type = other DNA
ctgcaggggcctcacaatca

SEQ ID NO: 3565 - DNA, 20 bp, synthetic construct
  misc_feature 1..20: note = Synthetic Sequence
  source 1..20: mol_type = other DNA
tacaacatatcagaatctct

SEQ ID NO: 3566 - DNA, 20 bp, synthetic construct
  misc_feature 1..20: note = Synthetic Sequence
  source 1..20: mol_type = other DNA
ctctcagggaggctaagagg

SEQ ID NO: 3567 - DNA, 20 bp, synthetic construct
  misc_feature 1..20: note = Synthetic Sequence
  source 1..20: mol_type = other DNA
cactatgcccaactaacatt

SEQ ID NO: 3568 - DNA, 20 bp, synthetic construct
  misc_feature 1..20: note = Synthetic Sequence
  source 1..20: mol_type = other DNA
cctgagagtttggcgatctc

SEQ ID NO: 3569 - DNA, 20 bp, synthetic construct
  misc_feature 1..20: note = Synthetic Sequence
  source 1..20: mol_type = other DNA
gctggcaatctgggcattgc

SEQ ID NO: 3570 - DNA, 20 bp, synthetic construct
  misc_feature 1..20: note = Synthetic Sequence
  source 1..20: mol_type = other DNA
ggtaggaggatccttagccc

SEQ ID NO: 3571 - DNA, 20 bp, synthetic construct
  misc_feature 1..20: note = Synthetic Sequence
  source 1..20: mol_type = other DNA
ctcaattgcagcctgtatgg

SEQ ID NO: 3572 - DNA, 20 bp, synthetic construct
  misc_feature 1..20: note = Synthetic Sequence
  source 1..20: mol_type = other DNA
gctgagccctgaacaaagac

SEQ ID NO: 3573 - DNA, 20 bp, synthetic construct
  misc_feature 1..20: note = Synthetic Sequence
  source 1..20: mol_type = other DNA
ggagaagtgcacggtgtgat

SEQ ID NO: 3574 - DNA, 20 bp, synthetic construct
  misc_feature 1..20: note = Synthetic Sequence
  source 1..20: mol_type = other DNA
aaaagtgctctattctaact

SEQ ID NO: 3575 - DNA, 20 bp, synthetic construct
  misc_feature 1..20: note = Synthetic Sequence
  source 1..20: mol_type = other DNA
agagcagctcacagaactca

SEQ ID NO: 3576 - DNA, 20 bp, synthetic construct
  misc_feature 1..20: note = Synthetic Sequence
  source 1..20: mol_type = other DNA
gagaagtgcacggtgtgata

SEQ ID NO: 3577 - DNA, 20 bp, synthetic construct
  misc_feature 1..20: note = Synthetic Sequence
  source 1..20: mol_type = other DNA
tagagcagctcacagaactc

SEQ ID NO: 3578 - DNA, 20 bp, synthetic construct
  misc_feature 1..20: note = Synthetic Sequence
  source 1..20: mol_type = other DNA
ctttcataccattcttaatt

SEQ ID NO: 3579 - DNA, 20 bp, synthetic construct
  misc_feature 1..20: note = Synthetic Sequence
  source 1..20: mol_type = other DNA
gacatgctatctcagggcaa

SEQ ID NO: 3580 - DNA, 20 bp, synthetic construct
  misc_feature 1..20: note = Synthetic Sequence
  source 1..20: mol_type = other DNA
aggggaagcaggcacgtttc

SEQ ID NO: 3581 - DNA, 20 bp, synthetic construct
  misc_feature 1..20: note = Synthetic Sequence
  source 1..20: mol_type = other DNA
ctgtacaggaagcgtggctg

SEQ ID NO: 3582 - DNA, 20 bp, synthetic construct
  misc_feature 1..20: note = Synthetic Sequence
  source 1..20: mol_type = other DNA
caggttatagtctgggagtc

SEQ ID NO: 3583 - DNA, 20 bp, synthetic construct
  misc_feature 1..20: note = Synthetic Sequence
  source 1..20: mol_type = other DNA
gcctcaccttcctgagtagc

SEQ ID NO: 3584 - DNA, 20 bp, synthetic construct
  misc_feature 1..20: note = Synthetic Sequence
  source 1..20: mol_type = other DNA
gacagttccacatggctgca

SEQ ID NO: 3585 - DNA, 20 bp, synthetic construct
  misc_feature 1..20: note = Synthetic Sequence
  source 1..20: mol_type = other DNA
cactaagttcggcatcaata

SEQ ID NO: 3586 - DNA, 20 bp, synthetic construct
  misc_feature 1..20: note = Synthetic Sequence
  source 1..20: mol_type = other DNA
tttctcacagttctggaagc

SEQ ID NO: 3587 - DNA, 20 bp, synthetic construct
  misc_feature 1..20: note = Synthetic Sequence
  source 1..20: mol_type = other DNA
ggagaattgcttgaaccctg

SEQ ID NO: 3588 - DNA, 20 bp, synthetic construct
  misc_feature 1..20: note = Synthetic Sequence
  source 1..20: mol_type = other DNA
agtggcatgaacctgggagg

SEQ ID NO: 3589 - DNA, 20 bp, synthetic construct
  misc_feature 1..20: note = Synthetic Sequence
  source 1..20: mol_type = other DNA
tacacatcaaaaagtgaagc

SEQ ID NO: 3590 - DNA, 20 bp, synthetic construct
  misc_feature 1..20: note = Synthetic Sequence
  source 1..20: mol_type = other DNA
tccatttgccaaagagagtt

SEQ ID NO: 3591 - DNA, 20 bp, synthetic construct
  misc_feature 1..20: note = Synthetic Sequence
  source 1..20: mol_type = other DNA
cttagcctgagtttcatagg

SEQ ID NO: 3592 - DNA, 20 bp, synthetic construct
  misc_feature 1..20: note = Synthetic Sequence
  source 1..20: mol_type = other DNA
acctgtagttccaggtactc

SEQ ID NO: 3593 - DNA, 20 bp, synthetic construct
  misc_feature 1..20: note = Synthetic Sequence
  source 1..20: mol_type = other DNA
atggactatgtgaaggagac

SEQ ID NO: 3594 - DNA, 20 bp, synthetic construct
  misc_feature 1..20: note = Synthetic Sequence
  source 1..20: mol_type = other DNA
aggcacgtttctggccatgg

SEQ ID NO: 3595 - DNA, 20 bp, synthetic construct
  misc_feature 1..20: note = Synthetic Sequence
  source 1..20: mol_type = other DNA
agcaggcacgtttctggcca

SEQ ID NO: 3596 - DNA, 20 bp, synthetic construct
  misc_feature 1..20: note = Synthetic Sequence
  source 1..20: mol_type = other DNA
tgacagttccacatggctgc

SEQ ID NO: 3597 - DNA, 20 bp, synthetic construct
  misc_feature 1..20: note = Synthetic Sequence
  source 1..20: mol_type = other DNA
aaggacagatgcacttacat

SEQ ID NO: 3598 - DNA, 20 bp, synthetic construct
  misc_feature 1..20: note = Synthetic Sequence
  source 1..20: mol_type = other DNA
tttcttaagttaacatgatt

SEQ ID NO: 3599 - DNA, 20 bp, synthetic construct
  misc_feature 1..20: note = Synthetic Sequence
  source 1..20: mol_type = other DNA
gctatttgggagggtgaggc

SEQ ID NO: 3600 - DNA, 20 bp, synthetic construct
  misc_feature 1..20: note = Synthetic Sequence
  source 1..20: mol_type = other DNA
atcccactactgatcagcac

SEQ ID NO: 3601 - DNA, 20 bp, synthetic construct
  misc_feature 1..20: note = Synthetic Sequence
  source 1..20: mol_type = other DNA
agtgagttctcatgatctga

SEQ ID NO: 3602 - DNA, 20 bp, synthetic construct
  misc_feature 1..20: note = Synthetic Sequence
  source 1..20: mol_type = other DNA
taaagaacaaaggggtttaa

SEQ ID NO: 3603 - DNA, 20 bp, synthetic construct
  misc_feature 1..20: note = Synthetic Sequence
  source 1..20: mol_type = other DNA
acctcaggtgatccacctgc

SEQ ID NO: 3604 - DNA, 20 bp, synthetic construct
  misc_feature 1..20: note = Synthetic Sequence
  source 1..20: mol_type = other DNA
aaccccagaggcagaggttg

SEQ ID NO: 3605 - DNA, 20 bp, synthetic construct
  misc_feature 1..20: note = Synthetic Sequence
  source 1..20: mol_type = other DNA
gcctgcaggatcctccccac

SEQ ID NO: 3606 - DNA, 20 bp, synthetic construct
  misc_feature 1..20: note = Synthetic Sequence
  source 1..20: mol_type = other DNA
agaattcgcttgaacctggg

SEQ ID NO: 3607 - DNA, 20 bp, synthetic construct
  misc_feature 1..20: note = Synthetic Sequence
  source 1..20: mol_type = other DNA
tgggcaatatagcaagatct

SEQ ID NO: 3608 - DNA, 20 bp, synthetic construct
  misc_feature 1..20: note = Synthetic Sequence
  source 1..20: mol_type = other DNA
aggacgaagcttccagagga

SEQ ID NO: 3609 - DNA, 20 bp, synthetic construct
  misc_feature 1..20: note = Synthetic Sequence
  source 1..20: mol_type = other DNA
agagaccatcctccatggac

SEQ ID NO: 3610 - DNA, 20 bp, synthetic construct
  misc_feature 1..20: note = Synthetic Sequence
  source 1..20: mol_type = other DNA
ggcaagttgcttgaggtctt

SEQ ID NO: 3611 - DNA, 20 bp, synthetic construct
  misc_feature 1..20: note = Synthetic Sequence
  source 1..20: mol_type = other DNA
agtagattagtggttgccta

SEQ ID NO: 3612 - DNA, 20 bp, synthetic construct
  misc_feature 1..20: note = Synthetic Sequence
  source 1..20: mol_type = other DNA
taatagatcaagtaagcgtg

SEQ ID NO: 3613 - DNA, 20 bp, synthetic construct
  misc_feature 1..20: note = Synthetic Sequence
  source 1..20: mol_type = other DNA
gttaacacctgttgaaggag

SEQ ID NO: 3614 - DNA, 20 bp, synthetic construct
  misc_feature 1..20: note = Synthetic Sequence
  source 1..20: mol_type = other DNA
aaatatttagcaatgaattg

SEQ ID NO: 3615 - DNA, 20 bp, synthetic construct
  misc_feature 1..20: note = Synthetic Sequence
  source 1..20: mol_type = other DNA
aaatcaatgagtccaggagc

SEQ ID NO: 3616 - DNA, 20 bp, synthetic construct
  misc_feature 1..20: note = Synthetic Sequence
  source 1..20: mol_type = other DNA
ctctcaggctgcagttatgg

SEQ ID NO: 3617 - DNA, 20 bp, synthetic construct
  misc_feature 1..20: note = Synthetic Sequence
  source 1..20: mol_type = other DNA
tgtttatttcacctaggtgc

SEQ ID NO: 3618 - DNA, 20 bp, synthetic construct
  misc_feature 1..20: note = Synthetic Sequence
  source 1..20: mol_type = other DNA
tctcactatgctgcccaggt

SEQ ID NO: 3619 - DNA, 20 bp, synthetic construct
  misc_feature 1..20: note = Synthetic Sequence
  source 1..20: mol_type = other DNA
catgaaagacttgtgaatcc

SEQ ID NO: 3620 - DNA, 20 bp, synthetic construct
  misc_feature 1..20: note = Synthetic Sequence
  source 1..20: mol_type = other DNA
tgttatgaaagccttactag

SEQ ID NO: 3621 - DNA, 20 bp, synthetic construct
  misc_feature 1..20: note = Synthetic Sequence
  source 1..20: mol_type = other DNA
tcccattgcacctgatgcat

SEQ ID NO: 3622 - DNA, 20 bp, synthetic construct
  misc_feature 1..20: note = Synthetic Sequence
  source 1..20: mol_type = other DNA
tcacaaagtacattatcaca

SEQ ID NO: 3623 - DNA, 20 bp, synthetic construct
  misc_feature 1..20: note = Synthetic Sequence
  source 1..20: mol_type = other DNA
ccagtagtgggagtgtgcct

SEQ ID NO: 3624 - DNA, 20 bp, synthetic construct
  misc_feature 1..20: note = Synthetic Sequence
  source 1..20: mol_type = other DNA
tggccagaaccagtccatgg

SEQ ID NO: 3625 - DNA, 20 bp, synthetic construct
  misc_feature 1..20: note = Synthetic Sequence
  source 1..20: mol_type = other DNA
aatcactctgtcacccaggc

SEQ ID NO: 3626 - DNA, 20 bp, synthetic construct
  misc_feature 1..20: note = Synthetic Sequence
  source 1..20: mol_type = other DNA
catttaaatgtattataatt

SEQ ID NO: 3627 - DNA, 20 bp, synthetic construct
  misc_feature 1..20: note = Synthetic Sequence
  source 1..20: mol_type = other DNA
atcctcagcaaactatcgca

SEQ ID NO: 3628 - DNA, 20 bp, synthetic construct
  misc_feature 1..20: note = Synthetic Sequence
  source 1..20: mol_type = other DNA
catttgaatccgggaggcgg

SEQ ID NO: 3629 - DNA, 20 bp, synthetic construct
  misc_feature 1..20: note = Synthetic Sequence
  source 1..20: mol_type = other DNA
accagtagtgggagtgtgcc

SEQ ID NO: 3630 - DNA, 20 bp, synthetic construct
  misc_feature 1..20: note = Synthetic Sequence
  source 1..20: mol_type = other DNA
gcaagttgcttgaggtcttt

SEQ ID NO: 3631 - DNA, 20 bp, synthetic construct
  misc_feature 1..20: note = Synthetic Sequence
  source 1..20: mol_type = other DNA
gtaggagaatcgcttgaaca

SEQ ID NO: 3632 - DNA, 20 bp, synthetic construct
  misc_feature 1..20: note = Synthetic Sequence
  source 1..20: mol_type = other DNA
aaagaacaaaggggtttaat

SEQ ID NO: 3633 - DNA, 20 bp, synthetic construct
  misc_feature 1..20: note = Synthetic Sequence
  source 1..20: mol_type = other DNA
gcctcgacctctcaaattgc

SEQ ID NO: 3634 - DNA, 20 bp, synthetic construct
  misc_feature 1..20: note = Synthetic Sequence
  source 1..20: mol_type = other DNA
gtgaaggcttgtgatgggat

SEQ ID NO: 3635 - DNA, 20 bp, synthetic construct
  misc_feature 1..20: note = Synthetic Sequence
  source 1..20: mol_type = other DNA
atattaccaaggctttgact

SEQ ID NO: 3636 - DNA, 20 bp, synthetic construct
  misc_feature 1..20: note = Synthetic Sequence
  source 1..20: mol_type = other DNA
ctactcaggaggccgaggca

SEQ ID NO: 3637 - DNA, 20 bp, synthetic construct
  misc_feature 1..20: note = Synthetic Sequence
  source 1..20: mol_type = other DNA
tcagccatggcaacatactg

SEQ ID NO: 3638 - DNA, 20 bp, synthetic construct
  misc_feature 1..20: note = Synthetic Sequence
  source 1..20: mol_type = other DNA
tgagaccatcgtggccaaca

SEQ ID NO: 3639 - DNA, 20 bp, synthetic construct
  misc_feature 1..20: note = Synthetic Sequence
  source 1..20: mol_type = other DNA
gtatagattaaaattaactt

SEQ ID NO: 3640 - DNA, 20 bp, synthetic construct
  misc_feature 1..20: note = Synthetic Sequence
  source 1..20: mol_type = other DNA
tgcccaaggtcccaccaaat

SEQ ID NO: 3641 - DNA, 20 bp, synthetic construct
  misc_feature 1..20: note = Synthetic Sequence
  source 1..20: mol_type = other DNA
cagaaccagtccatggagga

SEQ ID NO: 3642 - DNA, 20 bp, synthetic construct
  misc_feature 1..20: note = Synthetic Sequence
  source 1..20: mol_type = other DNA
tcaagagatggaggccatcc

SEQ ID NO: 3643 - DNA, 20 bp, synthetic construct
  misc_feature 1..20: note = Synthetic Sequence
  source 1..20: mol_type = other DNA
ctcccactactggtcgatgt

SEQ ID NO: 3644 - DNA, 20 bp, synthetic construct
  misc_feature 1..20: note = Synthetic Sequence
  source 1..20: mol_type = other DNA
acgcaccataatctaagccc

SEQ ID NO: 3645 - DNA, 20 bp, synthetic construct
  misc_feature 1..20: note = Synthetic Sequence
  source 1..20: mol_type = other DNA
ggcagaagaaaaggcagctg

SEQ ID NO: 3646 - DNA, 20 bp, synthetic construct
  misc_feature 1..20: note = Synthetic Sequence
  source 1..20: mol_type = other DNA
gggaagcagtcagagagcct

SEQ ID NO: 3647 - DNA, 20 bp, synthetic construct
  misc_feature 1..20: note = Synthetic Sequence
  source 1..20: mol_type = other DNA
gcgtggaaggggacccaagt

SEQ ID NO: 3648 - DNA, 20 bp, synthetic construct
  misc_feature 1..20: note = Synthetic Sequence
  source 1..20: mol_type = other DNA
cactatgcccaactaatatt

SEQ ID NO: 3649 - DNA, 20 bp, synthetic construct
  misc_feature 1..20: note = Synthetic Sequence
  source 1..20: mol_type = other DNA
tcaagccctgtctttgttca

SEQ ID NO: 3650 - DNA, 20 bp, synthetic construct
  misc_feature 1..20: note = Synthetic Sequence
  source 1..20: mol_type = other DNA
ggggaccaccaggttgccta

SEQ ID NO: 3651 - DNA, 20 bp, synthetic construct
  misc_feature 1..20: note = Synthetic Sequence
  source 1..20: mol_type = other DNA
ggtgcaatgggaagctcttc

SEQ ID NO: 3652 - DNA, 20 bp, synthetic construct
  misc_feature 1..20: note = Synthetic Sequence
  source 1..20: mol_type = other DNA
tgcttgaaaccggaaggcag

SEQ ID NO: 3653 - DNA, 20 bp, synthetic construct
  misc_feature 1..20: note = Synthetic Sequence
  source 1..20: mol_type = other DNA
cgcttgaaccctggaagcag

SEQ ID NO: 3654 - DNA, 20 bp, synthetic construct
  misc_feature 1..20: note = Synthetic Sequence
  source 1..20: mol_type = other DNA
cttgtgaactcctgggctca

SEQ ID NO: 3655 - DNA, 20 bp, synthetic construct
  misc_feature 1..20: note = Synthetic Sequence
  source 1..20: mol_type = other DNA
ggaatggaggggcccaatct

SEQ ID NO: 3656 - DNA, 20 bp, synthetic construct
  misc_feature 1..20: note = Synthetic Sequence
  source 1..20: mol_type = other DNA
gctcctatttggtgggacct

SEQ ID NO: 3657 - DNA, 20 bp, synthetic construct
  misc_feature 1..20: note = Synthetic Sequence
  source 1..20: mol_type = other DNA
tcaaaattctctcggccccg

SEQ ID NO: 3658 - DNA, 20 bp, synthetic construct
  misc_feature 1..20: note = Synthetic Sequence
  source 1..20: mol_type = other DNA
ctcccacatcgaccagtagt

SEQ ID NO: 3659 - DNA, 20 bp, synthetic construct
  misc_feature 1..20: note = Synthetic Sequence
  source 1..20: mol_type = other DNA
cttactcatctgctctcccc

SEQ ID NO: 3660 - DNA, 20 bp, synthetic construct
  misc_feature 1..20: note = Synthetic Sequence
  source 1..20: mol_type = other DNA
aatgagttcatgtcatttgc

SEQ ID NO: 3661 - DNA, 20 bp, synthetic construct
  misc_feature 1..20: note = Synthetic Sequence
  source 1..20: mol_type = other DNA
gtaacctgactctttgttca

SEQ ID NO: 3662 - DNA, 20 bp, synthetic construct
  misc_feature 1..20: note = Synthetic Sequence
  source 1..20: mol_type = other DNA
cttatttagttcacttggtg

SEQ ID NO: 3663 - DNA, 20 bp, synthetic construct
  misc_feature 1..20: note = Synthetic Sequence
  source 1..20: mol_type = other DNA
tggtgacctcctgtgagcgg

SEQ ID NO: 3664 - DNA, 20 bp, synthetic construct
  misc_feature 1..20: note = Synthetic Sequence
  source 1..20: mol_type = other DNA
gcagatttgagctttcttct

SEQ ID NO: 3665 - DNA, 20 bp, synthetic construct
  misc_feature 1..20: note = Synthetic Sequence
  source 1..20: mol_type = other DNA
tgtggaagcaactttggaat

SEQ ID NO: 3666 - DNA, 20 bp, synthetic construct
  misc_feature 1..20: note = Synthetic Sequence
  source 1..20: mol_type = other DNA
aatatgtgaaggcttgtgat

SEQ ID NO: 3667 - DNA, 20 bp, synthetic construct
  misc_feature 1..20: note = Synthetic Sequence
  source 1..20: mol_type = other DNA
cagccaagggagataggggt

SEQ ID NO: 3668 - DNA, 20 bp, synthetic construct
  misc_feature 1..20: note = Synthetic Sequence
  source 1..20: mol_type = other DNA
aataatcgcttgaacccagg

SEQ ID NO: 3669 - DNA, 20 bp, synthetic construct
  misc_feature 1..20: note = Synthetic Sequence
  source 1..20: mol_type = other DNA
catcaggaagttaccctatg

SEQ ID NO: 3670 - DNA, 20 bp, synthetic construct
  misc_feature 1..20: note = Synthetic Sequence
  source 1..20: mol_type = other DNA
gatttagggcaagttgcttg

SEQ ID NO: 3671 - DNA, 20 bp, synthetic construct
  misc_feature 1..20: note = Synthetic Sequence
  source 1..20: mol_type = other DNA
gataaagaaacaggcacaga

SEQ ID NO: 3672 - DNA, 20 bp, synthetic construct
  misc_feature 1..20: note = Synthetic Sequence
  source 1..20: mol_type = other DNA
caggagttcacaagcaacct

SEQ ID NO: 3673 - DNA, 20 bp, synthetic construct
  misc_feature 1..20: note = Synthetic Sequence
  source 1..20: mol_type = other DNA
gggacagaaattgtgcactt

SEQ ID NO: 3674 - DNA, 20 bp, synthetic construct
  misc_feature 1..20: note = Synthetic Sequence
  source 1..20: mol_type = other DNA
ttatatgaaatgtccagaac

SEQ ID NO: 3675 - DNA, 20 bp, synthetic construct
  misc_feature 1..20: note = Synthetic Sequence
  source 1..20: mol_type = other DNA
acctaactctctttggcaaa

SEQ ID NO: 3676 - DNA, 20 bp, synthetic construct
  misc_feature 1..20: note = Synthetic Sequence
  source 1..20: mol_type = other DNA
tgcacttgcatgtctcaaga

SEQ ID NO: 3677 - DNA, 20 bp, synthetic construct
  misc_feature 1..20: note = Synthetic Sequence
  source 1..20: mol_type = other DNA
gggaggatcctgcaggcgga

SEQ ID NO: 3678 - DNA, 20 bp, synthetic construct
  misc_feature 1..20: note = Synthetic Sequence
  source 1..20: mol_type = other DNA
tgagttacagcgacagctac

SEQ ID NO: 3679 - DNA, 20 bp, synthetic construct
  misc_feature 1..20: note = Synthetic Sequence
  source 1..20: mol_type = other DNA
ctagagcctccagaaggaac

SEQ ID NO: 3680 - DNA, 20 bp, synthetic construct
  misc_feature 1..20: note = Synthetic Sequence
  source 1..20: mol_type = other DNA
tcccatgcatcaggtgcaat

SEQ ID NO: 3681 - DNA, 20 bp, synthetic construct
  misc_feature 1..20: note = Synthetic Sequence
  source 1..20: mol_type = other DNA
atcactgtcttgatttataa

SEQ ID NO: 3682 - DNA, 20 bp, synthetic construct
  misc_feature 1..20: note = Synthetic Sequence
  source 1..20: mol_type = other DNA
agataaagaaacaggcacag

SEQ ID NO: 3683 - DNA, 20 bp, synthetic construct
  misc_feature 1..20: note = Synthetic Sequence
  source 1..20: mol_type = other DNA
atctaatgattatgtgtctt

SEQ ID NO: 3684 - DNA, 20 bp, synthetic construct
  misc_feature 1..20: note = Synthetic Sequence
  source 1..20: mol_type = other DNA
atcagccagaagcccctctc

SEQ ID NO: 3685 - DNA, 20 bp, synthetic construct
  misc_feature 1..20: note = Synthetic Sequence
  source 1..20: mol_type = other DNA
caggagaattacttgaactt

SEQ ID NO: 3686 - DNA, 20 bp, synthetic construct
  misc_feature 1..20: note = Synthetic Sequence
  source 1..20: mol_type = other DNA
ttcccattgcacctgatgca

SEQ ID NO: 3687 - DNA, 20 bp, synthetic construct
  misc_feature 1..20: note = Synthetic Sequence
  source 1..20: mol_type = other DNA
aaagtacattatcacaaggg

SEQ ID NO: 3688 - DNA, 20 bp, synthetic construct
  misc_feature 1..20: note = Synthetic Sequence
  source 1..20: mol_type = other DNA
ggtaacctgactctttgttc

SEQ ID NO: 3689 - DNA, 20 bp, synthetic construct
  misc_feature 1..20: note = Synthetic Sequence
  source 1..20: mol_type = other DNA
gcaatttgagaggtcgaggc

SEQ ID NO: 3690 - DNA, 20 bp, synthetic construct
  misc_feature 1..20: note = Synthetic Sequence
  source 1..20: mol_type = other DNA
tgcactcattcaggaagaaa

SEQ ID NO: 3691 - DNA, 20 bp, synthetic construct
  misc_feature 1..20: note = Synthetic Sequence
  source 1..20: mol_type = other DNA
cgtttgaacccgggaggagg

SEQ ID NO: 3692 - DNA, 20 bp, synthetic construct
  misc_feature 1..20: note = Synthetic Sequence
  source 1..20: mol_type = other DNA
ttcccatgcatcaggtgcaa

SEQ ID NO: 3693 - DNA, 20 bp, synthetic construct
  misc_feature 1..20: note = Synthetic Sequence
  source 1..20: mol_type = other DNA
actcccactactggtcgatg

SEQ ID NO: 3694 - DNA, 20 bp, synthetic construct
  misc_feature 1..20: note = Synthetic Sequence
  source 1..20: mol_type = other DNA
cacttgaattcaggaggcgg

SEQ ID NO: 3695 - DNA, 20 bp, synthetic construct
  misc_feature 1..20: note = Synthetic Sequence
  source 1..20: mol_type = other DNA
ggagacagacacagaggaga

SEQ ID NO: 3696 - DNA, 20 bp, synthetic construct
  misc_feature 1..20: note = Synthetic Sequence
  source 1..20: mol_type = other DNA
cccaggcacactcccactac

SEQ ID NO: 3697 - DNA, 20 bp, synthetic construct
  misc_feature 1..20: note = Synthetic Sequence
  source 1..20: mol_type = other DNA
tctaagggggtccacgtgag

SEQ ID NO: 3698 - DNA, 20 bp, synthetic construct
  misc_feature 1..20: note = Synthetic Sequence
  source 1..20: mol_type = other DNA
acaaaattagctgggtgtgc

SEQ ID NO: 3699 - DNA, 20 bp, synthetic construct
  misc_feature 1..20: note = Synthetic Sequence
  source 1..20: mol_type = other DNA
gagaatggcttcaacctggg

SEQ ID NO: 3700 - DNA, 20 bp, synthetic construct
  misc_feature 1..20: note = Synthetic Sequence
  source 1..20: mol_type = other DNA
cagacggtgtttcaccatgt

SEQ ID NO: 3701 - DNA, 20 bp, synthetic construct
  misc_feature 1..20: note = Synthetic Sequence
  source 1..20: mol_type = other DNA
cagaagaattgcttgaaacc

SEQ ID NO: 3702 - DNA, 20 bp, synthetic construct
  misc_feature 1..20: note = Synthetic Sequence
  source 1..20: mol_type = other DNA
cctgaaaacagcacactgat

SEQ ID NO: 3703 - DNA, 20 bp, synthetic construct
  misc_feature 1..20: note = Synthetic Sequence
  source 1..20: mol_type = other DNA
ggacagctccagctggcatc

SEQ ID NO: 3704 - DNA, 20 bp, synthetic construct
  misc_feature 1..20: note = Synthetic Sequence
  source 1..20: mol_type = other DNA
ggaagcagtcagagagcctt

SEQ ID NO: 3705 - DNA, 20 bp, synthetic construct
  misc_feature 1..20: note = Synthetic Sequence
  source 1..20: mol_type = other DNA
ctcctatttggtgggacctt

SEQ ID NO: 3706 - DNA, 20 bp, synthetic construct
  misc_feature 1..20: note = Synthetic Sequence
  source 1..20: mol_type = other DNA
ctggattcacaagtctttca

SEQ ID NO: 3707 - DNA, 20 bp, synthetic construct
  misc_feature 1..20: note = Synthetic Sequence
  source 1..20: mol_type = other DNA
gagagggggtttccccatgt

SEQ ID NO: 3708 - DNA, 20 bp, synthetic construct
  misc_feature 1..20: note = Synthetic Sequence
  source 1..20: mol_type = other DNA
gtaacttcttcaggctgaac

SEQ ID NO: 3709 - DNA, 20 bp, synthetic construct
  misc_feature 1..20: note = Synthetic Sequence
  source 1..20: mol_type = other DNA
aataatagacacaggcaggg

SEQ ID NO: 3710 - DNA, 20 bp, synthetic construct
  misc_feature 1..20: note = Synthetic Sequence
  source 1..20: mol_type = other DNA
atgctgaacgccggtcccct

SEQ ID NO: 3711 - DNA, 20 bp, synthetic construct
  misc_feature 1..20: note = Synthetic Sequence
  source 1..20: mol_type = other DNA
actcccacatcgaccagtag

SEQ ID NO: 3712 - DNA, 20 bp, synthetic construct
  misc_feature 1..20: note = Synthetic Sequence
  source 1..20: mol_type = other DNA
gcagacactagtaaaaacaa

SEQ ID NO: 3713 - DNA, 20 bp, synthetic construct
  misc_feature 1..20: note = Synthetic Sequence
  source 1..20: mol_type = other DNA
ctaagggggtccacgtgaga

SEQ ID NO: 3714 - DNA, 20 bp, synthetic construct
  misc_feature 1..20: note = Synthetic Sequence
  source 1..20: mol_type = other DNA
atttgagaggtcgaggcggg

SEQ ID NO: 3715 - DNA, 20 bp, synthetic construct
  misc_feature 1..20: note = Synthetic Sequence
  source 1..20: mol_type = other DNA
cttgagacatgcaagtgcac

SEQ ID NO: 3716 - DNA, 20 bp, synthetic construct
  misc_feature 1..20: note = Synthetic Sequence
  source 1..20: mol_type = other DNA
attagccggcgaccgagaga

SEQ ID NO: 3717 - protein, 166 aa, synthetic construct
  REGION 1..166: note = Synthetic Sequence
SEVEFSHEYWMRHALTLAKRARDEREVPVGAVLVLNNRVIGEGWNRAIGLHDPTAHAEIMALRQGGLVMQNYRLIDATLYGTFEPCVMCAGAMIHSRIGRVVFGVRNAKTGAAGSLMDVLHYPGMNHRVEITEGILADECAALLCYFFRMPRQVFNAQKKAQSSTD

SEQ ID NO: 3718 - protein, 166 aa, synthetic construct
  REGION 1..166: note = Synthetic Sequence
SEVEFSHEYWMRHALTLAKRARDEREVPVGAVLVLNNRVIGEGWNRAIGLHDPTAHAEIMALRQGGLVMQNYRLIDATLYVTFEPCVMCAGAMIHSRIGRVVFGVRQSKRGAAGSLMNVLNYPGMNHRVEITEGILADECAALTCDFYRMPRQVFNAQKKAQSSIN

SEQ ID NO: 3719 - protein, 1367 aa, synthetic construct
  REGION 1..1367: note = Synthetic Sequence
DKKYSIGLAIGTNSVGWAVITDEYKVPSKKFKVLGNTDRHSIKKNLIGALLFDSGETAEATRLKRTARRRYTRRKNRICYLQEIFSNEMAKVDDSFFHRLEESFLVEEDKKHERHPIFGNIVDEVAYHEKYPTIYHLRKKLVDSTDKADLRLIYLALAHMIKFRGHFLIEGDLNPDNSDVDKLFIQLVQTYNQLFEENPINASGVDAKAILSARLSKSRRLENLIAQLPGEKKNGLFGNLIALSLGLTPNFKSNFDLAEDAKLQLSKDTYDDDLDNLLAQIGDQYADLFLAAKNLSDAILLSDILRVNTEITKAPLSASMIKRYDEHHQDLTLLKALVRQQLPEKYKEIFFDQSKNGYAGYIDGGASQEEFYKFIKPILEKMDGTEELLVKLNREDLLRKQRTFDNGSIPHQIHLGELHAILRRQEDFYPFLKDNREKIEKILTFRIPYYVGPLARGNSRFAWMTRKSEETITPWNFEEVVDKGASAQSFIERMTNFDKNLPNEKVLPKHSLLYEYFTVYNELTKVKYVTEGMRKPAFLSGEQKKAIVDLLFKTNRKVTVKQLKEDYFKKIECFDSVEISGVEDRFNASLGTYHDLLKIIKDKDFLDNEENEDILEDIVLTLTLFEDREMIEERLKTYAHLFDDKVMKQLKRRRYTGWGRLSRKLINGIRDKQSGKTILDFLKSDGFANRNFMQLIHDDSLTFKEDIQKAQVSGQGDSLHEHIANLAGSPAIKKGILQTVKVVDELVKVMGRHKPENIVIEMARENQTTQKGQKNSRERMKRIEEGIKELGSQILKEHPVENTQLQNEKLYLYYLQNGRDMYVDQELDINRLSDYDVDHIVPQSFLKDDSIDNKVLTRSDKNRGKSDNVPSEEVVKKMKNYWRQLLNAKLITQRKFDNLTKAERGGLSELDKAGFIKRQLVETRQITKHVAQILDSRMNTKYDENDKLIREVKVITLKSKLVSDFRKDFQFYKVREINNYHHAHDAYLNAVVGTALIKKYPKLESEFVYGDYKVYDVRKMIAKSEQEIGKATAKYFFYSNIMNFFKTEITLANGEIRKRPLIETNGETGEIVWDKGRDFATVRKVLSMPQVNIVKKTEVQTGGFSKESILPKRNSDKLIARKKDWDPKKYGGFDSPTVAYSVLVVAKVEKGKSKKLKSVKELLGITIMERSSFEKNPIDFLEAKGYKEVKKDLIIKLPKYSLFELENGRKRMLASAGELQKGNELALPSKYVNFLYLASHYEKLKGSPEDNEQKQLFVEQHKHYLDEIIEQISEFSKRVILADANLDKVLSAYNKHRDKPIREQAENIIHLFTLTNLGAPAAFKYFDTTIDRKRYTSTKEVLDATLIHQSITGLYETRIDLSQLGGD

SEQ ID NO: 3720 - protein, 1367 aa, synthetic construct
  REGION 1..1367: note = Synthetic Sequence
DKKYSIGLAIGTNSVGWAVITDEYKVPSKKFKVLGNTDRHSIKKNLIGALLFDSGETAEATRLKRTARRRYTRRKNRICYLQEIFSNEMAKVDDSFFHRLEESFLVEEDKKHERHPIFGNIVDEVAYHEKYPTIYHLRKKLVDSTDKADLRLIYLALAHMIKFRGHFLIEGDLNPDNSDVDKLFIQLVQTYNQLFEENPINASGVDAKAILSARLSKSRRLENLIAQLPGEKKNGLFGNLIALSLGLTPNFKSNFDLAEDAKLQLSKDTYDDDLDNLLAQIGDQYADLFLAAKNLSDAILLSDILRVNTEITKAPLSASMIKRYDEHHQDLTLLKALVRQQLPEKYKEIFFDQSKNGYAGYIDGGASQEEFYKFIKPILEKMDGTEELLVKLNREDLLRKQRTFDNGSIPHQIHLGELHAILRRQEDFYPFLKDNREKIEKILTFRIPYYVGPLARGNSRFAWMTRKSEETITPWNFEEVVDKGASAQSFIERMTNFDKNLPNEKVLPKHSLLYEYFTVYNELTKVKYVTEGMRKPAFLSGEQKKAIVDLLFKTNRKVTVKQLKEDYFKKIECFDSVEISGVEDRFNASLGTYHDLLKIIKDKDFLDNEENEDILEDIVLTLTLFEDREMIEERLKTYAHLFDDKVMKQLKRRRYTGWGRLSRKLINGIRDKQSGKTILDFLKSDGFANRNFMQLIHDDSLTFKEDIQKAQVSGQGDSLHEHIANLAGSPAIKKGILQTVKVVDELVKVMGRHKPENIVIEMARENQTTQKGQKNSRERMKRIEEGIKELGSQILKEHPVENTQLQNEKLYLYYLQNGRDMYVDQELDINRLSDYDVDAIVPQSFLKDDSIDNKVLTRSDKNRGKSDNVPSEEVVKKMKNYWRQLLNAKLITQRKFDNLTKAERGGLSELDKAGFIKRQLVETRQITKHVAQILDSRMNTKYDENDKLIREVKVITLKSKLVSDFRKDFQFYKVREINNYHHAHDAYLNAVVGTALIKKYPKLESEFVYGDYKVYDVRKMIAKSEQEIGKATAKYFFYSNIMNFFKTEITLANGEIRKRPLIETNGETGEIVWDKGRDFATVRKVLSMPQVNIVKKTEVQTGGFSKESILPKRNSDKLIARKKDWDPKKYGGFDSPTVAYSVLVVAKVEKGKSKKLKSVKELLGITIMERSSFEKNPIDFLEAKGYKEVKKDLIIKLPKYSLFELENGRKRMLASAGELQKGNELALPSKYVNFLYLASHYEKLKGSPEDNEQKQLFVEQHKHYLDEIIEQISEFSKRVILADANLDKVLSAYNKHRDKPIREQAENIIHLFTLTNLGAPAAFKYFDTTIDRKRYTSTKEVLDATLIHQSITGLYETRIDLSQLGGD

SEQ ID NO: 3721 - protein, 1596 aa, synthetic construct
  REGION 1..1596: note = Synthetic Sequence
MKRTADGSEFESPKKKRKVSEVEFSHEYWMRHALTLAKRARDEREVPVGAVLVLNNRVIGEGWNRAIGLHDPTAHAEIMALRQGGLVMQNYRLIDATLYGTFEPCVMCAGAMIHSRIGRVVFGVRNAKTGAAGSLMDVLHYPGMNHRVEITEGILADECAALLCYFFRMPRQVFNAQKKAQSSTDSGGSSGGSSGSETPGTSESATPESSGGSSGGSDKKYSIGLAIGTNSVGWAVITDEYKVPSKKFKVLGNTDRHSIKKNLIGALLFDSGETAEATRLKRTARRRYTRRKNRICYLQEIFSNEMAKVDDSFFHRLEESFLVEEDKKHERHPIFGNIVDEVAYHEKYPTIYHLRKKLVDSTDKADLRLIYLALAHMIKFRGHFLIEGDLNPDNSDVDKLFIQLVQTYNQLFEENPINASGVDAKAILSARLSKSRRLENLIAQLPGEKKNGLFGNLIALSLGLTPNFKSNFDLAEDAKLQLSKDTYDDDLDNLLAQIGDQYADLFLAAKNLSDAILLSDILRVNTEITKAPLSASMIKRYDEHHQDLTLLKALVRQQLPEKYKEIFFDQSKNGYAGYIDGGASQEEFYKFIKPILEKMDGTEELLVKLNREDLLRKQRTFDNGSIPHQIHLGELHAILRRQEDFYPFLKDNREKIEKILTFRIPYYVGPLARGNSRFAWMTRKSEETITPWNFEEVVDKGASAQSFIERMTNFDKNLPNEKVLPKHSLLYEYFTVYNELTKVKYVTEGMRKPAFLSGEQKKAIVDLLFKTNRKVTVKQLKEDYFKKIECFDSVEISGVEDRFNASLGTYHDLLKIIKDKDFLDNEENEDILEDIVLTLTLFEDREMIEERLKTYAHLFDDKVMKQLKRRRYTGWGRLSRKLINGIRDKQSGKTILDFLKSDGFANRNFMQLIHDDSLTFKEDIQKAQVSGQGDSLHEHIANLAGSPAIKKGILQTVKVVDELVKVMGRHKPENIVIEMARENQTTQKGQKNSRERMKRIEEGIKELGSQILKEHPVENTQLQNEKLYLYYLQNGRDMYVDQELDINRLSDYDVDHIVPQSFLKDDSIDNKVLTRSDKNRGKSDNVPSEEVVKKMKNYWRQLLNAKLITQRKFDNLTKAERGGLSELDKAGFIKRQLVETRQITKHVAQILDSRMNTKYDENDKLIREVKVITLKSKLVSDFRKDFQFYKVREINNYHHAHDAYLNAVVGTALIKKYPKLESEFVYGDYKVYDVRKMIAKSEQEIGKATAKYFFYSNIMNFFKTEITLANGEIRKRPLIETNGETGEIVWDKGRDFATVRKVLSMPQVNIVKKTEVQTGGFSKESILPKRNSDKLIARKKDWDPKKYGGFDSPTVAYSVLVVAKVEKGKSKKLKSVKELLGITIMERSSFEKNPIDFLEAKGYKEVKKDLIIKLPKYSLFELENGRKRMLASAGELQKGNELALPSKYVNFLYLASHYEKLKGSPEDNEQKQLFVEQHKHYLDEIIEQISEFSKRVILADANLDKVLSAYNKHRDKPIREQAENIIHLFTLTNLGAPAAFKYFDTTIDRKRYTSTKEVLDATLIHQSITGLYETRIDLSQLGGDGGSGPPKKKRKV

SEQ ID NO: 3722 - protein, 1596 aa, synthetic construct
  REGION 1..1596: note = Synthetic Sequence
MKRTADGSEFESPKKKRKVSEVEFSHEYWMRHALTLAKRARDEREVPVGAVLVLNNRVIGEGWNRAIGLHDPTAHAEIMALRQGGLVMQNYRLIDATLYVTFEPCVMCAGAMIHSRIGRVVFGVRQSKRGAAGSLMNVLNYPGMNHRVEITEGILADECAALTCDFYRMPRQVFNAQKKAQSSINSGGSSGGSSGSETPGTSESATPESSGGSSGGSDKKYSIGLAIGTNSVGWAVITDEYKVPSKKFKVLGNTDRHSIKKNLIGALLFDSGETAEATRLKRTARRRYTRRKNRICYLQEIFSNEMAKVDDSFFHRLEESFLVEEDKKHERHPIFGNIVDEVAYHEKYPTIYHLRKKLVDSTDKADLRLIYLALAHMIKFRGHFLIEGDLNPDNSDVDKLFIQLVQTYNQLFEENPINASGVDAKAILSARLSKSRRLENLIAQLPGEKKNGLFGNLIALSLGLTPNFKSNFDLAEDAKLQLSKDTYDDDLDNLLAQIGDQYADLFLAAKNLSDAILLSDILRVNTEITKAPLSASMIKRYDEHHQDLTLLKALVRQQLPEKYKEIFFDQSKNGYAGYIDGGASQEEFYKFIKPILEKMDGTEELLVKLNREDLLRKQRTFDNGSIPHQIHLGELHAILRRQEDFYPFLKDNREKIEKILTFRIPYYVGPLARGNSRFAWMTRKSEETITPWNFEEVVDKGASAQSFIERMTNFDKNLPNEKVLPKHSLLYEYFTVYNELTKVKYVTEGMRKPAFLSGEQKKAIVDLLFKTNRKVTVKQLKEDYFKKIECFDSVEISGVEDRFNASLGTYHDLLKIIKDKDFLDNEENEDILEDIVLTLTLFEDREMIEERLKTYAHLFDDKVMKQLKRRRYTGWGRLSRKLINGIRDKQSGKTILDFLKSDGFANRNFMQLIHDDSLTFKEDIQKAQVSGQGDSLHEHIANLAGSPAIKKGILQTVKVVDELVKVMGRHKPENIVIEMARENQTTQKGQKNSRERMKRIEEGIKELGSQILKEHPVENTQLQNEKLYLYYLQNGRDMYVDQELDINRLSDYDVDHIVPQSFLKDDSIDNKVLTRSDKNRGKSDNVPSEEVVKKMKNYWRQLLNAKLITQRKFDNLTKAERGGLSELDKAGFIKRQLVETRQITKHVAQILDSRMNTKYDENDKLIREVKVITLKSKLVSDFRKDFQFYKVREINNYHHAHDAYLNAVVGTALIKKYPKLESEFVYGDYKVYDVRKMIAKSEQEIGKATAKYFFYSNIMNFFKTEITLANGEIRKRPLIETNGETGEIVWDKGRDFATVRKVLSMPQVNIVKKTEVQTGGFSKESILPKRNSDKLIARKKDWDPKKYGGFDSPTVAYSVLVVAKVEKGKSKKLKSVKELLGITIMERSSFEKNPIDFLEAKGYKEVKKDLIIKLPKYSLFELENGRKRMLASAGELQKGNELALPSKYVNFLYLASHYEKLKGSPEDNEQKQLFVEQHKHYLDEIIEQISEFSKRVILADANLDKVLSAYNKHRDKPIREQAENIIHLFTLTNLGAPAAFKYFDTTIDRKRYTSTKEVLDATLIHQSITGLYETRIDLSQLGGDGGSGPPKKKRKV

SEQ ID NO: 3723 - protein, 1596 aa, synthetic construct
  REGION 1..1596: note = Synthetic Sequence
MKRTADGSEFESPKKKRKVSEVEFSHEYWMRHALTLAKRARDEREVPVGAVLVLNNRVIGEGWNRAIGLHDPTAHAEIMALRQGGLVMQNYRLIDATLYVTFEPCVMCAGAMIHSRIGRVVFGVRQSKRGAAGSLMNVLNYPGMNHRVEITEGILADECAALTCDFYRMPRQVFNAQKKAQSSINSGGSSGGSSGSETPGTSESATPESSGGSSGGSDKKYSIGLAIGTNSVGWAVITDEYKVPSKKFKVLGNTDRHSIKKNLIGALLFDSGETAEATRLKRTARRRYTRRKNRICYLQEIFSNEMAKVDDSFFHRLEESFLVEEDKKHERHPIFGNIVDEVAYHEKYPTIYHLRKKLVDSTDKADLRLIYLALAHMIKFRGHFLIEGDLNPDNSDVDKLFIQLVQTYNQLFEENPINASGVDAKAILSARLSKSRRLENLIAQLPGEKKNGLFGNLIALSLGLTPNFKSNFDLAEDAKLQLSKDTYDDDLDNLLAQIGDQYADLFLAAKNLSDAILLSDILRVNTEITKAPLSASMIKRYDEHHQDLTLLKALVRQQLPEKYKEIFFDQSKNGYAGYIDGGASQEEFYKFIKPILEKMDGTEELLVKLNREDLLRKQRTFDNGSIPHQIHLGELHAILRRQEDFYPFLKDNREKIEKILTFRIPYYVGPLARGNSRFAWMTRKSEETITPWNFEEVVDKGASAQSFIERMTNFDKNLPNEKVLPKHSLLYEYFTVYNELTKVKYVTEGMRKPAFLSGEQKKAIVDLLFKTNRKVTVKQLKEDYFKKIECFDSVEISGVEDRFNASLGTYHDLLKIIKDKDFLDNEENEDILEDIVLTLTLFEDREMIEERLKTYAHLFDDKVMKQLKRRRYTGWGRLSRKLINGIRDKQSGKTILDFLKSDGFANRNFMQLIHDDSLTFKEDIQKAQVSGQGDSLHEHIANLAGSPAIKKGILQTVKVVDELVKVMGRHKPENIVIEMARENQTTQKGQKNSRERMKRIEEGIKELGSQILKEHPVENTQLQNEKLYLYYLQNGRDMYVDQELDINRLSDYDVDAIVPQSFLKDDSIDNKVLTRSDKNRGKSDNVPSEEVVKKMKNYWRQLLNAKLITQRKFDNLTKAERGGLSELDKAGFIKRQLVETRQITKHVAQILDSRMNTKYDENDKLIREVKVITLKSKLVSDFRKDFQFYKVREINNYHHAHDAYLNAVVGTALIKKYPKLESEFVYGDYKVYDVRKMIAKSEQEIGKATAKYFFYSNIMNFFKTEITLANGEIRKRPLIETNGETGEIVWDKGRDFATVRKVLSMPQVNIVKKTEVQTGGFSKESILPKRNSDKLIARKKDWDPKKYGGFDSPTVAYSVLVVAKVEKGKSKKLKSVKELLGITIMERSSFEKNPIDFLEAKGYKEVKKDLIIKLPKYSLFELENGRKRMLASAGELQKGNELALPSKYVNFLYLASHYEKLKGSPEDNEQKQLFVEQHKHYLDEIIEQISEFSKRVILADANLDKVLSAYNKHRDKPIREQAENIIHLFTLTNLGAPAAFKYFDTTIDRKRYTSTKEVLDATLIHQSITGLYETRIDLSQLGGDGGSGPPKKKRKV

What is claimed is:

1. A composition for measuring or estimating elapsed time in isolated cells, comprising:
(a) a prime editor protein or a nucleic acid encoding the same;
(b) a DNA tape comprising a disrupted monomer, which includes a disrupted protospacer adjacent motif (PAM), and active monomers, each including a PAM; and
(c) a prime editing guide RNA (pegRNA) which comprises a spacer and a reverse transcription template (RTT) and recognizes the DNA tape.

2. The composition according to claim 1, wherein the active monomers are arranged in a row at a 3′ end of the disrupted monomer.

3. The composition according to claim 2, wherein a specific base sequence is inserted into a write-head by prime editing, and the PAM in the active monomer at an editing site is disrupted.

4. The composition according to claim 1, wherein each disrupted monomer in the DNA tape has a length of (j+i_{D}+k) bp, and each active monomer in the DNA tape has a length of (j+i_{A}+k) bp,
wherein
i_{D}, i_{A}, j and k are integers greater than 0,
the disrupted PAM has a length of i_{D} bp,
the PAM has a length of i_{A}bp,
a sequence present in the 5′ direction with respect to the PAM or the disrupted PAM has a length of j bp;
a sequence present in the 5′ direction with respect to the PAM or the disrupted PAM has a length of k bp; and
a sequence inserted by prime editing has a length of m bp.

5. The composition according to claim 4, wherein the prime editing guide RNA that recognizes the DNA tape comprises a target-binding site of (j+k) bp (j+k<16).

6. The composition according to claim 1, wherein the prime editor comprises: (i) nickase or a dead editor; and (ii) Moloney murine leukaemia virus (M-MLV) reverse transcriptase (RT).

7. The composition according to claim 6, wherein the nickase is one in which at least one amino acid selected from the group consisting of D10, E762, H839, H840, N854, N863, and D986 of Cas9 is substituted with a different amino acid.

8. The composition according to claim 7, wherein the different amino acid is alanine.

9. Isolated cells having introduced therein:
(a) a nucleic acid that encodes a prime editor so that the prime editor is expressed or is planned to be expressed;
(b) a DNA tape comprising a disrupted monomer, which comprises a disrupted PAM, and active monomers, each comprising a PAM; and
(c) a prime editing guide RNA (pegRNA) which comprises a spacer and a reverse transcription template (RTT) and recognizes the DNA tape.

10. A method for measuring or estimating elapsed time in isolated cells, comprising steps of:
culturing the isolated cells of claim 9;
harvesting the cultured cells at any time point t, and then analyzing whether a sequence has been inserted into the DNA tape from a genomic DNA of the cells;
based on analyzing whether the sequence has been inserted into the DNA tape, measuring a fraction of an inserted sequence at each insertion site in copies of the DNA tape sequence at time t, that is, an insertion frequency (IF_{i,t}) at an i^{th} insertion site at time t;
measuring a frequency of a copy number of an intact sequence at each insertion site in a total copy number of the DNA tape sequence at time t, that is, a frequency of intact sequence (F_{i,t}) at the i^{th} insertion site at time t; and
calculating a time elapsed from a given time point using the following equation:
$${F}_{i , t} = 1 - {IF}_{i , t} = {e}^{- {λ}_{i} ( t - {t}_{0} )} ( t \geq 0 , {t}_{0} \geq 0 )$$
wherein F_{i,t} represents the frequency (fraction) of the copy number of an intact sequence at the i^{th} insertion site relative to the total copy number of the DNA tape, analyzed at any time point t, IF_{i,t} represents the frequency of an inserted sequence at the i^{th} insertion site, measured at any time point t, λᵢ is a positive constant that represents the rate of sequence insertion by prime editing at the i^{th} insertion site per unit time, and t₀ is the latent time taken for the composition transduced into the cells to be expressed.
